(19) United States
(12) Patent Application Publication
(10) Pub. No.: US 2023/0390349 A1
(43) Pub. Date: Dec. 7, 2023

(54) FUSOBACTERIUM BACTERIOPHAGE AND USES THEREOF

(71) Applicant: Biomx Ltd., Nes Ziona (IL)

(72) Inventors: Lior Moshe ZELCBUCH, Herzeliya (IL); Sagit YAHAV, Kiryat Gat (IL); Maya KAHAN-HANUM, Hod Hasharon (IL); Naomi Bluma ZAK, Jerusalem (IL); Lihi NINIO-MANY, Tel-Aviv (IL)

(73) Assignee: Biomx Ltd., Nes Ziona (IL)

(21) Appl. No.: 18/033,822

(22) PCT Filed: Nov. 11, 2021
(86) PCT No.: PCT/IL2021/051350

§ 371 Date: Apr. 26, 2023

Related U.S. Application Data
(60) Provisional application No. 63/112,729, filed on Nov. 12, 2020.
(60) Provisional application No. 63/183,698, filed on May 4, 2021.

(51) Int. Cl. A61K 35/76; A61P 35/00

(52) U.S. Cl. CPC A61K 35/76; A61P 35/00

(57) ABSTRACT

A method of treating a disease associated with Fusobacterium nucleatum infection in a subject in need thereof is disclosed. The method comprises administering to the subject a therapeutically effective amount of at least one isolated bacteriophage capable of infecting a Fusobacterium nucleatum bacterial species, wherein said at least one bacteriophage has a genomic nucleic acid sequence at least 85% identical to the nucleic acid sequence as set forth in SEQ ID NOs: 1-7 or 15-20. Compositions for treating the disease are also disclosed.

### RELATED APPLICATIONS

[0001] This application claims the benefit of priority of U.S. Provisional Patent Application No. 63/112,729 filed 12 Nov. 2020 and U.S. Provisional Patent Application No. 63/183,698, filed 4 May 2021, the contents of which are incorporated herein by reference in their entirety.

### SEQUENCE LISTING STATEMENT

[0002] The ASCII file, entitled 89717SequenceListing.txt, created on 9 Nov. 2021, comprising 686,714 bytes, submitted concurrently with the filing of this application is incorporated herein by reference.

### FIELD AND BACKGROUND OF THE INVENTION

[0003] The present invention, in some embodiments thereof, relates to bacteriophage capable of infecting Fusobacterium nucleatum bacteria and uses thereof.

[0004] Fusobacterium nucleatum (FN) is a Gram-negative, anaerobic bacteria that is part of the oral microflora and considered to be a periodontal pathogen (B. Signat et al., Curr Issues Mol Biol., 2011; 13(2):25-36). Many recent studies have demonstrated associations between the presence of this bacterial species and a cancerous phenotype. FN was demonstrated to be significantly enriched in human colorectal adenomas and carcinomas compared with matched adjacent noncancerous tissue or tissue from healthy controls (H. Hussan et al., World J Gastroenterol., 2017 Dec. 28; 23(48):8626-86, 2017; A. D. Kostic et al., Appl Environ Microbiol., 2010 November; 76(21):7243-50). FN DNA is also overabundant in pancreas (K. Mitsuhashi et al., Oncotarget, 2015 Sep. 8; 6(26):22114-25), breast (T. J. Hieken et al., Sci Rep., 2016 Aug. 3; 6:30751), and esophageal (K. Yamamura et al., Clin Cancer Res., 2016 Nov. 15; 22(22):5574-5581) adenocarcinomas as well as in gastric cancer samples (J. Dicksved et al., J Med Microbiol., 2009 April; 58(Pt 4):509-16; G. Nardone et al., United European Gastroenterol J., 2015 June; 3(3):255-60). Fusobacteria is abundant in oral squamous cell carcinoma and predominant in late stage oral tumors (Z. Zhang et al., Front Microbiol. 2019 Jun. 26; 10:1439). FN has been reported as a dominant species in bile of gall bladder patients (Y. Tsuchiya et al., Asian Pacific J of Cancer Prev. 2018 Apr. 25; 19 (4): 961-967) and to be more abundant in urine from bladder cancer patients (V. Bucevic et al., Sci. Rep. 2018 Aug. 14:8(1):12157). Higher representation of Fusobacterium has been reported in the fecal material of lung cancer patients (W Q Zhang et al., Am. J. Transl. Res. 2018 Oct. 15: 10(10): 3171-3185) and melanoma skin samples of a melanoma pig model (J. Mrazek et al., (Folia Microb. (Praha) 2019 May; 64(30:435-442). Higher abundance of FN has been associated with advanced tumor stage and poor prognosis in colorectal cancer (K. Mima et al., Gut, 2016 December; 65(12):1973-1980). FN may also confer chemoresistance to tumors; FN was found to be abundant in colorectal cancer tissues of patients with recurrent disease post chemotherapy (T. Yu et al., Cell, 2017 Jul. 27; 170(3):548-563).

[0005] FN is classified into several subspecies that include nucleatum, animalis, vincentii and polymorphum. All 4 of these subspecies were identified in colorectal adenomas and adenocarcinomas by carrying out qPCR on DNA extracted from these tissues using Fusobacterium specific primers and then subsequently sequencing the amplicons obtained to determine the presence of individual Fusobacterium species and subspecies (X. Ye et al., Cancer Prev Res (Phila)., 2017 July; 10(7):398-409).

[0006] There are four reports of bacteriophage that infect or have been extracted from FN. One (P. Machuca et al., App Env Microbiol, 2010 November; 76(21):7243-50) describes the isolation of a Fusobacterium specific phage from the saliva of a healthy individual. The isolated phage efficiently formed plaques on bacterial lawns of Fusobacterium nucleatum polymorphum strains, but isolates of FN subsp. nucleatum and vincentii demonstrated low sensitivity to infection by plaque assay when 5 ul of the phage were applied at a concentration of 10⁷ pfu/ml. Only a small fragment of less than 400 bp of the phage DNA was sequenced and reported to show 93% identity to a P. acnes phage. In a second report (K. Cochrane et al., Anaerobe, 2016 April; 38:125-129), two temperate bacteriophage were isolated from the lysates of a Fusobacterium nucleatum animalis bacterial host that had been treated with mitomycin to induce prophage activation and excision from the host DNA. However, no infection of any host FN strain by these phage was observed (in either their original animalis host or in representatives of the animalis, vincentii and polymorphum subspecies). Thus, these phage were unable to be propagated. The authors suggest that the inability of these phage to infect a host could have been due to either the absence of any putative tail protein or endolysin encoding genes, or a defective tail structure. The third report (M. Kabwe et al., Sci Rep., 2019 Jun. 24; 9(1):9107) describes a lytic DNA phage isolated on Fusobacterium nucleatum polymorphum. The fourth report (D-W. Zheng et al., Nat. Biomed. Eng. 2019 July doi: 10.1038/s41551-019-0423-2) describes a DNA phage that infects subspecies polymorphum, nucleatum and vincentii, but provides no sequence information.

[0007] Given the high prevalence and abundance of FN species in tumors and the correlation of the presence of this bacteria with disease prognosis, FN elimination is a promising new modality for treatment of cancer, including oral and esophageal cancer, colorectal cancer, pancreatic cancer, gastric cancer, gall bladder cancer, breast cancer, lung cancer, bladder cancer and melanoma. In addition, highly targeted delivery of anti-cancer payloads to tumors using agents directed against the FN species offers a novel approach for localized cancer treatment.

### SUMMARY OF THE INVENTION

[0008] According to an aspect of the present invention there is provided a method of treating a disease associated with a Fusobacterium nucleatum infection in a subject in need thereof, comprising administering to the subject a therapeutically effective amount of at least one isolated bacteriophage capable of infecting a Fusobacterium nucleatum bacterial species causing the infection, wherein the at least one bacteriophage has a genomic nucleic acid sequence at least 85% identical to the nucleic acid sequence as set forth in SEQ ID NOs: 1, 2, 3, 4, 5, 6, 7, 15, 16, 17, 18, 19 or 20, thereby treating the disease associated with the Fusobacterium nucleatum infection.

[0009] According to an aspect of the present invention there is provided a method of treating a disease associated with a Fusobacterium nucleatum infection in a subject in need thereof, comprising administering to the subject a therapeutically effective amount of at least one isolated bacteriophage capable of infecting a Fusobacterium nucleatum bacterial species causing the infection, wherein the bacteriophage has a genomic nucleic acid sequence at least 85% identical to the genomic nucleic acid sequence of a bacteriophage deposited with the DSMZ under deposit number DSM 33306, DSM 33307, DSM 33582, DSM 33583, DSM 33639, DSM 33640, DSM 33641, DSM 33642 or DSM 33644, thereby treating the disease associated with the Fusobacterium nucleatum infection.

[0010] According to an embodiment of the present invention, the disease is cancer.

[0011] According to an embodiment of the present invention, the disease is a periodontal disease or an inflammatory bowel disease.

[0012] According to an embodiment of the present invention, the cancer is selected from the group consisting of oral and esophageal cancer, colorectal cancer, pancreatic cancer, gastric cancer, gall bladder cancer, breast cancer, lung cancer, bladder cancer and melanoma.

[0013] According to an embodiment of the present invention, the administering comprises intratumoral administration.

[0014] According to an embodiment of the present invention, the method further comprises identifying at least one strain of Fusobacterium nucleatum colonizing the subject prior to the administering.

[0015] According to an embodiment of the present invention, the at least one bacteriophage is deposited with the DSMZ under deposit number DSM 33582 or DSM 33583.

[0016] According to an embodiment of the present invention, the at least one bacteriophage has a genomic nucleic acid sequence at least 85% identical to the nucleic acid sequence as set forth in SEQ ID NOs: 3, 4 or 5.

[0017] According to an embodiment of the present invention, the method comprises administering to the subject at least two bacteriophages, wherein each of the at least two bacteriophages is capable of infecting a non-identical Fusobacterium nucleatum bacterial sub-species.

[0018] According to an embodiment of the present invention, the method comprises administering to the subject two or more different bacteriophages, wherein the two or more different bacteriophages are capable of infecting different Fusobacterium nucleatum bacterial strains.

[0019] According to an embodiment of the present invention, the method comprises administering to the subject at least two bacteriophages, wherein each of the at least two bacteriophages is capable of infecting an identical Fusobacterium nucleatum bacterial sub-species.

[0020] According to an embodiment of the present invention, the method comprises administering to the subject two or more different bacteriophages, wherein at least two of the two or more bacteriophages are capable of infecting an identical Fusobacterium nucleatum bacterial sub-species.

[0021] According to an embodiment of the present invention, the at least one bacteriophage is genetically modified such that the genome thereof comprises a heterologous sequence.

[0022] According to an embodiment of the present invention, the heterologous sequence encodes a therapeutic agent or a diagnostic agent.

[0023] According to an embodiment of the present invention, the bacteriophage has a genomic nucleic acid sequence at least 85% identical to the nucleic acid sequence as set forth in SEQ ID NOs: 1, 2, 6 or 7, or a genomic nucleic acid sequence at least 85% identical to the genomic nucleic acid sequence of a bacteriophage deposited with the DSMZ under deposit number DSM 33306, DSM 33307, DSM 33639 or DSM 33644, and wherein the heterologous sequence renders the bacteriophage lytic.

[0024] According to an embodiment of the present invention, the therapeutic or diagnostic agent is attached to the outer surface of the bacteriophage.

[0025] According to an embodiment of the present invention, the therapeutic agent comprises an immune modulating agent.

[0026] According to an aspect of the present invention there is provided a recombinant bacteriophage capable of infecting a Fusobacterium nucleatum bacterial species, wherein the bacteriophage has a genomic nucleic acid sequence at least 85% identical to the nucleic acid sequence as set forth in SEQ ID NOs: 1, 2, 3, 4, 5, 6, 7, 15, 16, 17, 18, 19 or 20, and wherein the bacteriophage is genetically modified such that the genome thereof comprises a heterologous sequence.

[0027] According to an aspect of the present invention there is provided a recombinant bacteriophage capable of infecting a Fusobacterium nucleatum bacterial species, wherein the bacteriophage has a genomic nucleic acid sequence at least 85% identical to the genomic nucleic acid sequence of a bacteriophage deposited with the DSMZ under deposit number DSM 33582, DSM 33583, DSM 33306, DSM 33639, DSM 33640, DSM 33641, DSM 33642 or DSM 33644, or DSM 33307, and wherein the bacteriophage is genetically modified such that the genome thereof comprises a heterologous sequence.

[0028] According to an embodiment of the present invention, the heterologous sequence encodes a therapeutic agent or a diagnostic agent.

[0029] According to an embodiment of the present invention, the bacteriophage has a genomic nucleic acid sequence at least 85% identical to the nucleic acid sequence as set forth in SEQ ID NOs: 1, 2, 6 or 7, and the heterologous sequence renders the bacteriophage lytic.

[0030] According to an embodiment of the present invention, the bacteriophage has a genomic nucleic acid sequence at least 85% identical to the genomic nucleic acid sequence of a bacteriophage deposited with the DSMZ under deposit number DSM 33306, DSM 33307, DSM 33639 or DSM 33644, the heterologous sequence renders the bacteriophage lytic.

[0031] According to an aspect of the present invention there is provided a composition comprising two or more different isolated bacteriophages capable of infecting a Fusobacterium nucleatum bacterial strain, wherein at least one of the two or more different bacteriophages has a genomic nucleic acid sequence at least 85% identical to the nucleic acid sequence as set forth in SEQ ID NOs: 1, 2, 3, 4, 5, 6, 7, 15, 16, 17, 18, 19 or 20, or has a genomic nucleic acid sequence at least 85% identical to the genomic nucleic acid sequence of a bacteriophage deposited with the DSMZ under deposit number DSM 33306, DSM 33582, DSM 33307, DSM 33583, DSM 33639, DSM 33640, DSM 33641, DSM 33642 or DSM 33644.

[0032] According to an embodiment of the present invention, two of two or more isolated bacteriophages has a genomic nucleic acid sequence at least 85% identical to the nucleic acid sequence as set forth in SEQ ID NOs: 1, 2, 3, 4, 5, 6, 71, 5, 16, 17, 18, 19 or 20, or has a genomic nucleic acid sequence at least 85% identical to the genomic nucleic acid sequence of a bacteriophage deposited with the DSMZ under deposit number DSM 33306, DSM 33582, DSM 33307, DSM 33583, DSM 33639, DSM 33640, DSM 33641, DSM 33642 or DSM 33644.

[0033] According to an embodiment of the present invention, each of the two or more bacteriophages is capable of infecting a non-identical Fusobacterium nucleatum bacterial sub-species.

[0034] According to an embodiment of the present invention, each of the at least two bacteriophages is capable of infecting an identical Fusobacterium nucleatum bacterial sub-species.

[0035] According to an embodiment of the present invention, at least two of the two or more bacteriophages is capable of infecting a non-identical Fusobacterium nucleatum bacterial sub-species.

[0036] According to an embodiment of the present invention, at least two of the two or more bacteriophages are capable of infecting an identical Fusobacterium nucleatum bacterial sub-species.

[0037] According to an embodiment of the present invention, the at least one bacteriophage is genetically modified such that the genome thereof comprises a heterologous sequence.

[0038] According to an embodiment of the present invention, the at least one bacteriophage is attached to a therapeutic or diagnostic agent.

[0039] According to an embodiment of the present invention, the heterologous sequence encodes a therapeutic agent or a diagnostic agent.

[0040] According to an embodiment of the present invention, the at least one bacteriophage has a genomic nucleic acid sequence at least 85% identical to the nucleic acid sequence as set forth in SEQ ID NOs: 1, 2, 6 or 7, or has a genomic nucleic acid sequence at least 85% identical to the genomic nucleic acid sequence of a bacteriophage deposited with the DSMZ under deposit number DSM 33306, DSM 33307, DSM 33639 or DSM 33644, and the heterologous sequence renders the at least one bacteriophage lytic.

[0041] According to an embodiment of the present invention, the therapeutic agent comprises an immune modulating agent.

[0042] According to an aspect of the present invention there is provided a pharmaceutical composition comprising a recombinant bacteriophage described herein as the active agent, and a pharmaceutical carrier.

[0043] According to an embodiment of the present invention, the pharmaceutical composition is formulated for intratumoral delivery.

[0044] According to an embodiment of the present invention, the composition is formulated for intratumoral delivery.

[0045] According to an aspect of the present invention there is provided an isolated bacteriophage capable of infecting a Fusobacterium nucleatum bacterial species, wherein the bacteriophage has a genomic nucleic acid sequence at least 85% identical to the nucleic acid sequence as set forth in SEQ ID NOs: 1, 2, 3, 4, 5, 6, 7 15, 16, 17, 18, 19 or 20, or having a genomic nucleic acid sequence at least 85% identical to the genomic nucleic acid sequence of a bacteriophage deposited with the DSMZ under deposit number DSM 33307, DSM 33306, DSM 33582, DSM 33583, DSM 33639, DSM 33640, DSM 33641, DSM 33642 or DSM 33644.

[0046] Unless otherwise defined, all technical and/or scientific terms used herein have the same meaning as commonly understood by one of ordinary skill in the art to which the invention pertains. Although methods and materials similar or equivalent to those described herein can be used in the practice or testing of embodiments of the invention, exemplary methods and/or materials are described below. In case of conflict, the patent specification, including definitions, will control. In addition, the materials, methods, and examples are illustrative only and are not intended to be necessarily limiting.

### BRIEF DESCRIPTION OF THE SEVERAL VIEWS OF THE DRAWINGS

[0047] Some embodiments of the invention are herein described, by way of example only, with reference to the accompanying drawings. With specific reference now to the drawings in detail, it is stressed that the particulars shown are by way of example and for purposes of illustrative discussion of embodiments of the invention. In this regard, the description taken with the drawings makes apparent to those skilled in the art how embodiments of the invention may be practiced.

[0048] In the drawings:

[0049] FIG. 1 depicts the comparative growth curves of FN1 bacteria alone, or in the presence of different multiplicity of infection (MOI) of phage FN1-1, as measured by optical density.

[0050] FIGS. 2A-C depict the incorporation of F. nucleatum (FN5) into subcutaneous murine colon carcinoma tumors as shown by measurement of CFUs recovered per gram tumor 2A) and per whole tumor (2B). The effect of different doses of FN5 on tumor growth is shown in 2C.

[0051] FIG. 3A depicts the schedule for tumor, FN5 bacteria, and FN5-1 phage inoculation into mice.

[0052] FIG. 3B depicts the genome of a lysogenized F. nucleatum. The location of the prophage and PCR primers and probe are marked.

[0053] FIG. 3C depicts a dot plot showing the amount of lysogenized FN5 in the presence or absence of FN5-1 phage administration.

[0054] FIG. 4 depicts the effect of a wild type lysogenic lambda phage (wt), a synthetic, repressor-less version of that wild-type lambda phage (Δcl), and a known lambda lytic phage mutant Vir (vir) on E. coli growth.

[0055] FIG. 5 depicts a shuttle plasmid used to insert a payload into the genome of a temperate phage specific for an FN host using homologous recombination, which also inactivates the integrase gene.

[0056] FIG. 6A is a photograph of a Western blot showing the expression of HiBiT-tagged mouse IL-15. WT-wild type phage; IL15-phage genome contains IL-15,FNP-phage genome contains native FN protein (enolase).

[0057] FIG. 6B is a photograph of a Western blot showing the expression of HiBiT-tagged pyruvate kinase and enolase.

[0058] FIG. 6C depicts the desired area of deletion in an exemplary shuttle plasmid as illustrated in FIG. 5.

[0059] FIGS. 7A-B depict how a payload plasmid can be transferred into a clinical F. nucleatum strain.

[0060] FIGS. 8A-B depict recombinant FN14-1 phage expressing an HiBiT-tagged-Integrase. The integrase of FN-14-1 phage was tagged with a C-terminal HiBiT tag using a homologous recombination method. The recombinant phage (expressing an HiBiT-tagged integrase) was detected by PCR (using a selective primers pair for the recombinant phage, FIG. 8A) and by Luciferase assay (FIG. 8B).

[0061] FIGS. 8C-E depict results of an experiment demonstrating that IL-15 engineered phage can successfully infect fusobacterium in a mouse cancer model. FIG. 8C illustrates fusobacterium colonization in tumors. FIG. 8D illustrates the amount of IL-15 engineered phage in phage-positive tumors. FIG. 8E illustrates detection of IL-15 payload, 4 days post phage administration.

[0062] FIGS. 9A-C illustrates F. nucleatum phage engineered from lysogenic to lytic. FIG. 9A is a diagram illustrating how the phage was engineered. FIG. 9B is a photograph of wild-type phage. FIG. 9C is a photograph of the engineered phage.

[0063] FIG. 10 is a graph illustrating that natural phage accumulate in bacteria colonized tumors. PFU assay on tumors extracted from mice inoculated with bacteria and treated with vehicle (FN+vehicle), treated with phages (FN+Phages) or treated with phages without bacteria colonization (Phage only) **p<0.05.

[0064] FIG. 11 is a bar graph illustrating a significant decrease in F. nucleatum load following natural phage treatment. qPCR of bacterial load in tumors inoculated with bacteria treated with vehicle control (FN) or treated with phages (FN+phages), **p<0.05. (n=4, each group).

[0065] FIG. 12 is a graph illustrating a reduction in tumor volume in groups treated with phage compared to vehicle control group.

### DESCRIPTION OF SPECIFIC EMBODIMENTS OF THE INVENTION

[0066] The present invention, in some embodiments thereof, relates to bacteriophage capable of infecting Fusobacterium nucleatum bacteria and uses thereof.

[0067] Before explaining at least one embodiment of the invention in detail, it is to be understood that the invention is not necessarily limited in its application to the details set forth in the following description or exemplified by the Examples. The invention is capable of other embodiments or of being practiced or carried out in various ways.

[0068] The present inventors have isolated bacteriophage characterized by having a high specificity to one or more particular FN subspecies (see Table 1) and having a high level of intrinsic safety, as they do not recognize human cells. For elimination of pathogenic FN subspecies, the present disclosure provides lytic bacteriophage, which do not have any capacity to integrate into the DNA of their bacterial host. Such bacteriophage bring about immediate target bacterial eradication through lysis after hijacking the host protein expression machinery to manufacture needed phage protein components. For delivery of therapeutic agents, the present invention provides both lytic phage and lysogenic phage that integrate into the DNA of an FN bacterial host, are replicated within that bacteria, and whose DNA payload may direct continued expression by the FN bacteria of the therapeutic agent.

[0069] Genetic manipulation of Fusobacterium nucleatum phage inside their host is difficult, due to the anaerobic growth conditions, low genomic GC content and multiple restriction systems of Fusobacterium nucleatum. (S. Coppenhagen-Glazer S et al., Infect Immun., 2015 March; 83(3):1104-13).

[0070] Whilst reducing the present invention to practice, the present inventors have demonstrated homing of FN phage to an FN bearing tumor following intravenous administration (FIGS. 3A-C). Using an animal model of a tumor with embedded FN, the present inventors have intravenously administered a lysogenic phage which may be inserted into the FN DNA in the tumor. This was observed by designing a PCR assay which specifically amplifies a PCR product with one primer recognizing sequences inside the phage and a second primer that recognizes the host DNA adjacent to the site of prophage insertion. This demonstrates the feasibility of employing phage of the present disclosure to target FN bacteria found inside tumors.

[0071] The present inventors have also shown that it is possible to convert a lysogenic phage into a lytic phage (FIG. 4 and FIGS. 9A-C). Engineering of such phage further enlarges the panel of lytic phage against FN that can be used to eradicate FN bacteria responsible for the disease.

[0072] As is illustrated herein under and in the examples section which follows, the present inventors show that it is possible to engineer FN phage to express a heterologous sequence (Table 5) pathing the way for the development of recombinant FN phage which express a therapeutic agent.

[0073] Thus, according to a first aspect of the present invention, there is provided an isolated bacteriophage capable of infecting a Fusobacterium nucleatum bacterial species, wherein the bacteriophage has a genomic nucleic acid sequence at least 85% identical to the nucleic acid sequence as set forth in SEQ ID NOs: 1, 2, 3, 4, 5, 6, 7, 15, 16, 17, 18, 19 or 20 or having a genomic nucleic acid sequence at least 85% identical to the genomic nucleic acid sequence of a bacteriophage deposited with the DSMZ under deposit number DSM 33307, DSM 33306, DSM 33582 or DSM 33583.

[0074] As used herein, the term “bacteriophage” and “phage” are used interchangeably and refer to an isolated virus that is capable of infecting a bacterium. Typically, a phage will be characterized by: 1) the nature of the nucleic acids that make up its genome, e.g., DNA, RNA, single-stranded or double-stranded; 2) the nature of its infectivity, e.g., lytic or temperate; and 3) the particular FN subspecies that it infects (and in certain instances the particular strain of that FN subspecies). This aspect is known as “host range”.

[0075] As used herein, the phrase “isolated bacteriophage”, “isolate” or grammatical equivalents as used herein refers to a bacteriophage which is removed from its natural environment (e.g. removed from bacteria which it typically infects). In one embodiment, the isolated bacteriophage is removed from cellular material and/or other elements that naturally exist in the source clinical or environmental sample. The term isolated bacteriophages includes such phages isolated from human or animal subjects (“clinical isolates” or “clinical variants”) and such phages isolated from the environment (“environmental isolates”).

[0076] As used herein, the phrase “phage strain” refers to the deposited or sequenced phage, as described herein.

[0077] The terms, “Fusobacteria nucleatum” and “FN” are used interchangeably and relate to a specific species of the anaerobic, gram negative Fusobacterium genus. There are four known subspecies of Fusobacteria nucleatum-Fusobacteria nucleatum nucleatum, Fusobacteria nucleatum animalis, Fusobacteria nucleatum vincentii, and Fusobacteria nucleatum polymorphum.

[0078] Also contemplated are functional homologs of those that are deposited with the DSMZ under deposit number DSM 33307, DSM 33306, DSM 33582, DSM 33583, DSM 33639, DSM 33640, DSM 33641, DSM 33642 or DSM 33644, wherein the functionally homologous bacteriophage is capable of infecting the same strain of Fusobacterium nucleatum (or even subspecies of Fusobacterium nucleatum) as that which the deposited bacteriophage infects.

[0079] Also contemplated are functional homologs of those that have a genomic nucleic acid sequence as set forth in SEQ ID NOs: 1, 2, 3, 4, 5, 6, 7, 15, 16, 17, 18, 19 or 20, wherein the functionally homologous bacteriophage is capable of infecting the same strain (or even subspecies) of Fusobacterium nucleatum as that which the bacteriophage having one of the above set forth genomic nucleic acid sequence infects.

[0080] As used herein “functional homolog” or “functionally homologous” or “variant” or grammatical equivalents as used herein refers to a bacteriophage with a genomic nucleic acid sequence different than that of the deposited bacteriophage (i.e., at least one mutation) resulting in a bacteriophage that is endowed with substantially the same ensemble of biological activities (+/−10%, 20%, 40%, 50%, 60% when tested under the same conditions) as that of the deposited bacteriophage and can be classified as infecting the same subspecies or strain of bacteria based on known methods of species/strain classifications.

[0081] A bacteriophage “infects” bacteria if it either causes the bacteria to lyse or integrates its nucleic acid sequence into the bacterial genome.

[0082] According to a specific embodiment, the bacteriophage has a genomic nucleic acid sequence at least 85% homologous (% identical) to the nucleic acid sequence as set forth in SEQ ID NOs: 1, 2, 3, 4, 5, 6 or 7.

[0083] According to another embodiment, the genomic nucleic acid sequence of the bacteriophage comprises sequence at least 85% homologous (% identical) to the nucleic acid sequence as set forth in SEQ ID NOs: 15-17.

[0084] According to another embodiment, the genomic nucleic acid sequence of the bacteriophage comprises sequence at least 85% homologous (% identical) to the nucleic acid sequence as set forth in SEQ ID NOs: 18-20.

[0085] As used herein, “percent homology”, “percent identity”, “sequence identity” or “identity” or grammatical equivalents as used herein in the context of two nucleic acid or polypeptide sequences includes reference to the residues in the two sequences which are the same when aligned. When percentage of sequence identity is used in reference to proteins it is recognized that residue positions which are not identical often differ by conservative amino acid substitutions, where amino acid residues are substituted for other amino acid residues with similar chemical properties (e.g. charge or hydrophobicity) and therefore do not change the functional properties of the molecule. Where sequences differ in conservative substitutions, the percent sequence identity may be adjusted upwards to correct for the conservative nature of the substitution. Sequences which differ by such conservative substitutions are considered to have “sequence similarity” or “similarity”. Means for making this adjustment are well-known to those of skill in the art. Typically this involves scoring a conservative substitution as a partial rather than a full mismatch, thereby increasing the percentage sequence identity. Thus, for example, where an identical amino acid is given a score of 1 and a non-conservative substitution is given a score of zero, a conservative substitution is given a score between zero and 1. The scoring of conservative substitutions is calculated, e.g., according to the algorithm of Henikoff S and Henikoff J G. [Amino acid substitution matrices from protein blocks. Proc. Natl. Acad. Sci. U.S.A. 1992, 89(22): 10915-9].

[0086] It will be appreciated that the percent identity of the genomic nucleic acid sequence of the bacteriophage is not calculated to include heterologous nucleic acid sequences that have been incorporated into anyone of the aligned genomes of the phage. Thus, the percent identity of the bacteriophage genomic nucleic acid sequence excludes heterologous nucleic acid sequences that encode payloads such as therapeutic agents or diagnostic agents. In addition, the percent identity of the genomic nucleic acid sequence of the bacteriophage is not calculated to include targeted deletions such as those used to convert the phage from a temperate phage to a lytic phage, as further described below.

[0087] Percent identity can be determined using any homology comparison software, including for example, the BlastN software of the National Center of Biotechnology Information (NCBI) such as by using default parameters.

[0088] Other exemplary sequence alignment programs that may be used to determine % homology or identity between two sequences include, but are not limited to, the FASTA package (including rigorous (SSEARCH, LALIGN, GGSEARCH and GLSEARCH) and heuristic (FASTA, FASTX/Y, TFASTX/Y and FASTS/M/F) algorithms, the EMBOSS package (Needle, stretcher, water and matcher), the BLAST programs (including, but not limited to BLASTN, BLASTX, TBLASTX, BLASTP, TBLASTN), megablast and BLAT. In some embodiments, the sequence alignment program is BLASTN. For example, 95% homology refers to 95% sequence identity determined by BLASTN, by combining all non-overlapping alignment segments (BLAST HSPs), summing their numbers of identical matches and dividing this sum with the length of the shorter sequence.

[0089] In some embodiments, the sequence alignment program is a basic local alignment program, e.g., BLAST. In some embodiments, the sequence alignment program is a pairwise global alignment program. In some embodiments, the pairwise global alignment program is used for protein-protein alignments. In some embodiments, the pairwise global alignment program is Needle. In some embodiments, the sequence alignment program is a multiple alignment program. In some embodiments, the multiple alignment program is MAFFT. In some embodiments, the sequence alignment program is a whole genome alignment program. In some embodiments, the whole genome alignment is performed using BLASTN. In some embodiments, BLASTN is utilized without any changes to the default parameters.

[0090] According to some embodiments of the invention, the identity is a global identity, i.e., an identity over the entire nucleic acid sequences of the invention and not over portions thereof.

[0091] According to a specific embodiment, the genomic nucleic acid sequence is at least about 85%, at least about 90%, at least about 91%, at least about 92%, at least about 93%, at least about 94%, at least about 95%, at least about 96% least about 97%, at least about 97.1%, at least about 97.2%, at least about 97.3%, at least about 97.4%, at least about 97.5%, at least about 97.6%, at least about 97.7%, at least about 97.8%, at least about 97.9%, at least about 98%, at least about 98.1%, at least about 98.2%, at least about 98.3%, at least about 98.4%, at least about 98.5%, at least about 98.6%, at least about 98.7%, at least about 98.8%, at least about 98.9%, at least about 99%, at least about 99.1%, at least about 99.2%, at least about 99.3%, at least about 99.4%, at least about 99.5%, at least about 99.6%, at least about 99.7%, at least about 99.8%, at least about 99.8%, at least about 99.9%, at least about 99.95% 99.95%, at least about 99.99%, or more identical to the genomic sequence of the deposited bacteriophage or to one of the genomic sequences as set forth in SEQ ID NOs: 1, 2, 3, 4, 5, 6, 7, 15-17 or 18-20.

[0092] According to a specific embodiment, the genomic nucleic acid sequence is at least about 97%, at least about 97.1%, at least about 97.2%, at least about 97.3%, at least about 97.4%, at least about 97.5%, at least about 97.6%, at least about 97.7%, at least about 97.8%, at least about 97.9%, at least about 98%, at least about 98.1%, at least about 98.2%, at least about 98.3%, at least about 98.4%, at least about 98.5%, at least about 98.6%, at least about 98.7%, at least about 98.8%, at least about 98.9%, at least about 99%, at least about 99.1%, at least about 99.2%, at least about 99.3%, at least about 99.4%, at least about 99.5%, at least about 99.6%, at least about 99.7%, at least about 99.8%, at least about 99.8%, at least about 99.9% or more identical to that of the deposited bacteriophage or to one of the genomic sequences as set forth in SEQ ID NOs: 1, 2, 3, 4, 5, 6, 7, 15-17 or 18-20.

[0093] According to an additional or alternative embodiment, a functional homolog is determined as the average nucleotide identity (ANI), which detects the DNA conservation of the core genome (Konstantinidis K and Tiedje J M, 2005, Proc. Natl. Acad. Sci. USA 102: 2567-2592). In some embodiments, the ANI between the functional homolog and the deposited bacteriophage (or that having a genome as set forth in any one of SEQ ID NO: 1, 2, 3, 4, 5, 6, 7, 15-17 or 18-20) is of at least about 95%, at least about, 96%, at least about 97%, at least about 98%, at least about 99%, at least about 99.1%, at least about 99.5%, at least about 99.6%, at least about 99.7%, at least about 99.8%, at least about 99.9% or more.

[0094] According to an additional or alternative embodiment, a functional homolog is determined by the degree of relatedness between the functional homolog and the deposited bacteriophage (or that having a genome as set forth in any one of SEQ ID NO: 1, 2, 3, 4, 5, 6 or 7) determined as the Tetranucleotide Signature Frequency Correlation Coefficient, which is based on oligonucleotide frequencies (Bohlin J. et al. 2008, BMC Genomics, 9:104). In some embodiments, the Tetranucleotide Signature Frequency Correlation coefficient between the variant and the deposited bacteriophage (or that having a genome as set forth in any one of SEQ ID NO: 1, 2, 3, 4, 5, 6, 7, 15-17 or 18-20) is of about 0.99, 0.999 or more.

[0095] According to an additional or alternative embodiment, the degree of relatedness between the functional homolog and the deposited bacteriophage (or that having a genome as set forth in any one of SEQ ID NO: 1, 2, 3, 4, 5, 6 or 7) is determined as the degree of similarity obtained when analyzing the genomes of the parent and of the variant bacteriophage by Pulsed-field gel electrophoresis (PFGE) using one or more restriction endonucleases. The degree of similarity obtained by PFGE can be measured by the Dice similarity coefficient. In some embodiments, the Dice similarity coefficient between the variant and the deposited bacteriophage (or that having a genome as set forth in any one of SEQ ID NO: 1, 2, 3, 4, 5, 6, 7, 15-17 or 18-20) is of at least about 96%, at least about 97%, at least about 98%, at least about 99%, at least about 99.1%, at least about 99.5%, at least about 99.6%, at least about 99.7%, at least about 99.8%, at least about 99.9% or more.

[0096] According to an additional or alternative embodiment, the degree of relatedness between the functional homolog and the deposited bacteriophage (or that having a genome as set forth in any one of SEQ ID NO: 1, 2, 3, 4, 5, 6, 7, 15-17 or 18-20) is determined by the Pearson correlation coefficient obtained by comparing the genetic profiles of both phages obtained by repetitive extragenic palindromic element-based PCR (REP-PCR) (see e.g. Chou and Wang, Int J Food Microbiol. 2006, 110:135-48). In some embodiments, the Pearson correlation coefficient obtained by comparing the REP-PCR profiles of the variant and the deposited phage is of at least about 0.99, at least about 0.999 or more—see for example bmcmicrobioldotbiomedcentraldotcom/articles/10.1186/s12866-020-01770-2.

[0097] According to an additional or alternative embodiment, the degree of relatedness between the functional homolog and the deposited bacteriophage is defined by the linkage distance obtained by comparing the genetic profiles of both phages obtained by Multilocus sequence typing (MLST) (see e.g. Maiden, M. C., 1998, Proc. Natl. Acad. Sci. USA 95:3140-3145). In some embodiments, the linkage distance obtained by MLST of the functional homolog and the deposited phage (or that having a genome as set forth in any one of SEQ ID NO: 1, 2, 3, 4, 5, 6, 7, 15-17 or 18-20) is of at least about 0.99, at least about 0.999 or more.

[0098] According to an additional or alternative embodiment, the functional homolog comprises a functionally conserved gene or a fragment thereof e.g., an integrase gene, a polymerase gene, a capsid protein assembly gene, a DNA terminase, a tail fiber gene, or a repressor gene that is at least about 97%, at least about 98%, at least about 99%, at least about 99.1%, at least about 99.5%, at least about 99.6%, at least about 99.7%, at least about 99.8%, at least about 99.9%, or more identical to that of the deposited bacteriophage (or that having a genome as set forth in any one of SEQ ID NO: 1, 2, 3, 4, 5, 6, 7, 15-17 or 18-20).

[0099] According to an additional or alternative embodiment, the functional homolog is defined by a comparison of coding sequences (gene) order.

[0100] According to an additional or alternative embodiment, the functional homolog is defined by a comparison of order of non-coding sequences.

[0101] According to an additional or alternative embodiment, the functional homolog is defined by a comparison of order of coding and non-coding sequences.

[0102] According to some embodiments of the invention, the combined coding region of the functional homolog is such that it maintains the original order of the coding regions as within the genomic sequence of the deposited bacteriophage (or that having a genome as set forth in any one of SEQ ID NO: 1, 2, 3, 4, 5, 6, 7, 15-17 or 18-20), yet without the non-coding regions.

[0103] For example, in case the genomic sequence has the following coding regions, A, B, C, D, E, F, G, each flanked by non-coding sequences (e.g., regulatory elements, and the like), the combined coding region will include a single nucleic acid sequence having the A+B+C+D+E+F+G coding regions combined together while maintaining the original order of their genome, yet without the non-coding sequences.

[0104] According to some embodiments of the invention, the combined non-coding region of the functional homolog is such that it maintains the original order of the non-coding regions as within the genomic sequence of the deposited bacteriophage (or that having a genome as set forth in any one of SEQ ID NO: 1, 2, 3, 4, 5, 6, 7, 15-17 or 18-20), yet without the coding regions as originally present in the original bacteriophage.

[0105] According to some embodiments of the invention, the combined non-coding region and coding region (i.e., the genome) of the functional homolog is such that it maintains the original order of the coding and non-coding regions as within the genomic sequence of the bacteriophage deposit (or that having a genome as set forth in any one of SEQ ID NO: 1, 2, 3, 4, 5, 6, 7, 15-17 or 18-20).

[0106] As used herein “maintains” relate to at least about 90%, 91%, 92%, 93%, 94%, 95%, 96%, 97%, 98%, 99% or 100% of the coding and/or non-coding regions of the functional homolog compared to the deposited bacteriophage.

[0107] According to an additional or alternative embodiment, the functional homolog is defined by a comparison of gene content.

[0108] According to a specific embodiment, the functional homolog comprises a combined coding region at least about 90%, at least about 91%, at least about 92%, at least about 93%, at least about 94%, at least about 95%, at least about 96%, at least about 97%, at least about 98%, at least about 99%, or more (e.g., 100%) identical to the combined coding region existing in genome of the deposited bacteriophage (or that having a genome as set forth in any one of SEQ ID NO: 1, 2, 3, 4, 5, 6, 7, 15-17 or 18-20).

[0109] As used herein “combined coding region” refers to a nucleic acid sequence including all of the coding regions of the original bacteriophage yet without the non-coding regions of the original bacteriophage.

[0110] In one embodiment, the bacteriophages show up to 85% sequence identity with the bacteriophages disclosed herein and share at least one of the following characteristics—similar host range; similar type of infectivity (i.e. lytic or temperate).

[0111] In another embodiment, the bacteriophages show up to 85% sequence identity with the bacteriophages disclosed herein and share both of the following characteristics—similar host range; similar type of infectivity.

[0112] Additional bioinformatics methods that may be used to determine relatedness between two phage genomes include Nucmer and Minimap, both of which are alignment based tools; Win-zip, Jacard distance and MinHash, each of which are information based tools; and Codon usage similarity, pathway similarity and protein motif similarity.

[0113] As used herein, “host range” refers to the bacteria that are susceptible to infection by a particular phage. The host range of a phage may include, but is not limited to, a strain, a subspecies, a species, a genus, or multiple genera of bacteria.

[0114] Different phage isolates may be prepared and phenotyped using methods known in the art, e.g., a plaque assay, liquid media assay, solid media assay. In some embodiments, the solid media assays to quantify and isolate phage are based on plaque assays (S. T. Abedon et al., Methods in Molecular Biology 2009 (Clifton, N.J.), 501, 161-74), ranging from efficiency of plating (EOP) (E. Kutter, Methods in Molecular Biology 2009 (Clifton, N.J.), 501, 141-9) to spot testing (P. Hyman et al., Advances in Applied Microbiology (1st ed., Vol. 70, pp. 217-48) 2010. Elsevier Inc.). In some embodiments, the plate format used for the plaque assay can be modified, e.g., from a petri dish to a 48-well plate.

[0115] In some embodiments, a double-layer plaque assay is used to phenotype bacteriophage isolates. For example, a starter culture of 4 mL BHIS may be inoculated with 50-100 colonies from a plate. This culture may be incubated at 37° C. for 16 hours in an anaerobic environment. A volume of 200 μL of this culture may be mixed with 100 μL of a phage-containing sample (or medium only control) and incubated for 15 minutes. 5 mL of BHIS top agar (pre-molten 0.4% agar BHIS supplemented with 1 mM Ca²⁺, Mn²⁺ and Mg²⁺ ions may be added), and the mixture may be poured over a BHIS bottom agar plate (1.5% agar BHIS). The plates may be allowed to gel at room temperature, and then incubated for 16 hours at 37° C. in anaerobic environment until plaques are identified.

[0116] In some embodiments, a modified spot drop assay is used to phenotype bacteriophage isolates. For example, a starter culture of 4 mL BHIS may be inoculated with 50-100 colonies from a plate. This culture may be incubated at 37° C. for 16 hours in an anaerobic environment. A volume of 200 μL of this culture may be mixed with 5 mL of BHIS top agar (pre-molten 0.4% agar BHIS supplemented with 1 mM Ca²⁺, Mn²⁺ and Mg²⁺ ions may be added), and the mixture may be poured over a BHIS bottom agar plate (1.5% agar BHIS). The plates may be allowed to gel at room temperature, and then incubated for 30 min at 37 C in anaerobic environment. At this stage, 5 μL of samples containing phage or media only as control may be dropped on the plate, left to absorb, and then may be incubated for 16 hours until plaques are visible for counting.

[0117] In some embodiments, a liquid media assay is used to phenotype the bacteriophage. In some embodiments, liquid-based phage infection assays follow the time-course of infection and can provide more than quantitative end-points of infection as compared to the solid-phase plaque assays. In some embodiments, by mixing phage with bacteria in liquid medium, then following the turbidity of the culture over time, one can discern finer differences (e.g., a delay in the time of cell lysis) between how different bacterial strains interact with the phage. In some embodiments, the liquid media assay allows for high-throughput measurements by using 96-well plates and reading optical density in a plate reader.

[0118] For example, a bacterial strain may be grown for 16 hours until an OD₆₀₀ of about 1.5-2. This culture may then be diluted using BHIS medium (which may be supplemented with 0.1% g/w L-cysteine) to a starting optical density, typically between 0.03 and 0.05 OD₆₀₀ and kept for grow for 6 additional hours. A volume of 200 μL of culture may then be dispensed into the wells of a Nunclon flat-bottomed 96-well plate. 10 μL of a sample containing phage or 10 μL of medium as control may be added to each well. The wells may be covered with 50 μL of mineral oil to limit evaporation, and a thin sterile optically transparent polyester film may be added to keep the culture sterile and anaerobic. Optical density measurements may be carried out every 15 minutes, e.g., in a Tecan Infinite M200 plate reader connected to a Tecan EVO75 robot. Between measurements, the plate may be incubated while shaking at 37° C., e.g., inside the EVO75 incubator.

[0119] In some embodiments, infectivity is determined by the plaque presence in a solid assay only. In some embodiments, infectivity is determined by the plaque presence in a liquid assay only. In some embodiments, infectivity is determined by the plaque presence in both the liquid assay and the solid assay.

[0120] The bacteriophages described herein are typically present in a preparation in which their prevalence (i.e., concentration) is enriched over that (i.e. exceeds that) found in nature.

[0121] The term “preparation” refers to a composition in which the prevalence of bacteriophage is enriched over that found in nature. Since bacteriophages infect bacterial cells, they may be found in specimens or samples which are rich in bacteria—e.g. environmental samples such as sewage, wastewater and biological samples including feces. According to some embodiments of the invention, the preparation comprises less than 50 microbial species, e.g., bacteria and fungi—e.g. less than 40 bacterial species, less than 30 bacterial species, less than 20 bacterial species, less than 10 bacterial species, less than 5 bacterial species, less than 4 bacterial species, less than 3 bacterial species, less than 2 bacterial species or even devoid completely of bacteria.

[0122] According to a particular embodiment, the preparation comprises a single strain of bacteriophage (or a functional homolog thereof), no more than two different bacteriophage strains (or functional homologs thereof), no more than three different bacteriophage strains (or functional homologs thereof), no more than four different bacteriophage strains (or functional homologs thereof), no more than five different bacteriophage strains (or functional homologs thereof), no more than six different bacteriophage strains (or functional homologs thereof), no more than seven different bacteriophage strains (or functional homologs thereof), no more than eight different bacteriophage strains (or functional homologs thereof), no more than nine different bacteriophage strains (or functional homologs thereof), or no more than ten different bacteriophage strains (or functional homologs thereof).

[0123] The term “different” in the context of “two different bacteriophage strains” refers to bacteriophages which are genetically distinct from one another.

[0124] According to a specific embodiment the preparation comprises at least about 10⁶ PFU, 10⁷ PFU, 10⁸ PFU, 10⁹ PFU, or even 10¹⁰ PFU or more of the deposited bacteriophage or functional homolog of same.

[0125] The bacteriophages described herein may be genetically modified such that their genomes include a heterologous sequence (i.e. a sequence that is non-native to the wild-type phage). The heterologous sequence may be of any length, for example at least 20 nucleotides, at least 50 nucleotides, at least 100 nucleotides, at least 500 nucleotides or at least 1000 nucleotides.

[0126] In one embodiment, the heterologous sequence serves as a marker signifying whether transformation is successful—e.g. a barcode sequence.

[0127] In another embodiment, the heterologous sequence encodes at least one therapeutic or diagnostic agent (also referred to herein as a payload). The therapeutic or diagnostic agent may be a nucleic acid (e.g. RNA silencing agent), a peptide or a protein. The therapeutic agent is typically selected according to the disease which is to be treated. Thus, for example if the bacteriophage is to be used for treating cancer, the therapeutic agent is typically one that is known to be useful for treating cancer.

[0128] As used herein, the term “RNA silencing agent” refers to an RNA which is capable of specifically inhibiting or “silencing” the expression of a target gene. In certain embodiments, the RNA silencing agent is capable of preventing complete processing (e.g, the full translation and/or expression) of an mRNA molecule through a post-transcriptional silencing mechanism. RNA silencing agents include noncoding RNA molecules, for example RNA duplexes comprising paired strands, as well as precursor RNAs from which such small non-coding RNAs can be generated. Exemplary RNA silencing agents include dsRNAs such as siRNAs, miRNAs and shRNAs. In one embodiment, the RNA silencing agent is capable of inducing RNA interference. In another embodiment, the RNA silencing agent is capable of mediating translational repression. According to an embodiment of the invention, the RNA silencing agent is specific to the target RNA and does not cross inhibit or silence a gene or a splice variant which exhibits 99% or less global homology to the target gene, e.g., less than 98%, 97%, 96%, 95%, 94%, 93%, 92%, 91%, 90%, 89%, 88%, 87%, 86%, 85%, 84%, 83%, 82%, 81% global homology to the target gene.

[0129] Exemplary RNA silencing agents include but are not limited to siRNA, shRNA, miRNA and guide RNA (gRNA).

[0130] The therapeutic agent may be a bacterial protein or peptide (e.g., a small bacterial peptide that could act as a vaccine in the subject treated with the bacteriophage), a therapeutic protein or peptide (e.g., a cytokine, e.g., IL-15), a soluble peptide or protein ligand (e.g., a STING agonist or TRAIL), an antibody or an antibody fragment that recognizes a virulent or disease-causing antigen or is useful in an immunotherapy (e.g., a checkpoint inhibitor), an enzyme that when expressed produces a therapeutic useful product (e.g., a bacterial enzyme or metabolic cassette that produces a therapeutically useful bacterial metabolite or other bacterial antigen; a bacterial enzyme that produces LPS or causes cleavage of LPS from the outer membrane of gram negative bacteria), a shared tumor antigen or an enzyme that when expressed produces a shared tumor antigen, an agent which activates the immune system such as a TLR agonist or a RIG agonist, a unique tumor antigen or neoantigen or an enzyme that when expressed produces a unique tumor antigen or neoantigen,

[0131] In another embodiment, the therapeutic agent is an agent that is therapeutic in the treatment of cancer. The anti-cancer agent may cause reduced growth, reduced proliferation, and/or killing of the cancer cell. The therapeutic agent may be a drug converting enzyme (e.g. converts a pro-drug into a functional drug such as cytosine deaminase.

[0132] Exemplary therapeutic agents include, but are not limited to Purine Nucleoside Phosphorylase, Carboxypeptidase P2, Viral thymidine kinase (TK), thymidine phosphorylase (TP), nitroreductase (NTR), D-amino-acid oxidase (DAAO), xanthine-guanine phosphoribosyl transferase (XGPRT), penicillin-G amidase (PGA), β-lactamase (β-L). multiple-drug activation enzyme (MDAE), β-galactosidase (β-Gal), horseradish peroxidase (HRP), deoxyribonucleotide kinase (DRNK), deoxycytidine kinase (dCK), carboxypeptidase A (CPA), β-glucuronidase (β-Glu), and cytochrome P450 (CYP).

[0133] In another embodiment, the therapeutic agent is an anti-angiogenesis factor including but not limited to soluble VEGFR, soluble FGFR, Endostatin, Thrombospondin-1, Angiostatin, Vasostatin, NK4, Matrix metalloproteinases inhibitors (MMIPs/TIMPs), somatostatin receptors (SSTR) and Tumstatin.

[0134] The therapeutic agent may also be an agent that increases sensitivity to chemotherapy and/or irradiation. Thus, for example the therapeutic agent may be a radiosensitizer or a radiosensitizing agent that potentiates the toxicity of radiation therapy, including, but not limited to PTX, 17-AAG and Rapamaycin.

[0135] Sensitivity to radiation and chemotherapy can be influenced by factors extrinsic to the cancer cell. For example, severely hypoxic cells require 2-3 times the radiation dose as do well-oxygenated cells to achieve similar cell killing. Hence, response to cytotoxic therapy may be improved by modulating the tumor microenvironment (TME). Agents can be blockers/inhibitors for vascular endothelial growth factor (VEGF), a secreted protein that regulates angiogenesis, or hypoxia inducible factor-1 alpha (HIF-1 alpha), a master transcription factor that regulates gene expression in hypoxia.

[0136] According to another embodiment, the therapeutic agent is an immune modulating agent.

[0137] Examples of immune modulating agents include immunomodulatory cytokines, including but not limited to, IL-12, IL-2, IL-15, IL-7, IL-21, GM-CSF as well as any other cytokines that are capable of further enhancing immune responses; immunomodulatory antibodies, including but not limited to, anti-CTLA4, anti-CD40, anti-41BB, anti-OX40, anti-PD1, anti-PDL1 and chemokines such as CCL2, CXCL1 and CXCL10.

[0138] Examples of diagnostic agents include fluorescent proteins or enzymes producing a colorimetric reaction. Exemplary proteins that generate a detectable signal include, but are not limited to green fluorescent protein (Genbank Accession No. AAL33912), alkaline phosphatase (Genbank Accession No. AAK73766), peroxidase (Genbank Accession No. NP_568674), histidine tag (Genbank Accession No. AAK09208), Myc tag (Genbank Accession No. AF329457), biotin ligase tag (Genbank Accession No. NP_561589), orange fluorescent protein (Genbank Accession No. AAL33917), beta galactosidase (Genbank Accession No. NM_125776), Fluorescein isothiocyanate (Genbank Accession No. AAF22695) and strepavidin (Genbank Accession No. S11540).

[0139] In another example, the diagnostic agent is a luminescent protein such as products of bacterial luciferase genes, e.g., the luciferase genes encoded by Vibrio harveyi, Vibrio fischeri, and Xenorhabdus luminescens, the firefly luciferase gene FFlux, and the like.

[0140] It will be appreciated that the present invention also contemplates expression of heterologous proteins that elevate sensitivity of imaging or screening with computed tomography (CT).

[0141] Recombinant methods for inserting heterologous sequences into a phage genome are well-known in the art. The appropriate coding sequence is inserted in one or more of several locations in the phage genome. In one embodiment, the nucleic acid insert that is introduced into the phage genome is approximately no more than 10% of the phage genome length.

[0142] The payload coding sequence is inserted either after early, middle or late expressing phage genes and it can be expressed as part of a phage operon, relying on either an existing phage operon, promoter and terminator, or as a distinct operon. In the latter case, a relevant promoter and terminator from the phage is inserted as part of the newly formed operon.

[0143] For example, if strong expression of a payload is required, the payload coding sequence is added after the stop codon of the major capsid protein and expressed as part of the major capsid operon. Alternatively, it can be expressed by addition of a major capsid protein promoter and terminator as an individual newly formed operon which can be inserted anywhere in the phage genome that would not damage the functionality of the phage. If low expression of a payload is desired, the payload coding sequence can be added after the terminase gene (or other low expressing gene), which usually has low expression. Moreover, payload levels are tuned by adding a ribosome binding site with a desired strength.

[0144] In one embodiment, the payload is expressed under control of a bacterial host (e.g. FN) native promoter, using the phage native promoter or a promoter belonging to another phage that is known to infect the host.

[0145] In order to avoid negatively affecting phage infectivity and specificity, the payload coding sequence is typically not inserted inside an existing phage open reading frame. An exception to this is the case when the payload is intended to be expressed as a fusion protein of the phage outer coat. In that latter case of payload display, the payload coding sequence is added in frame to sequence encoding the phage coat protein.

[0146] In still another embodiment, the heterologous sequence renders a temperate phage lytic (e.g. by disrupting a gene crucial for the lysogenic cycle such as the repressor gene).

[0147] The term “lytic bacteriophage” refers to a bacteriophage that infects a bacterial host and causes that host to lyse without incorporating the phage nucleic acids into the host genome. A lytic bacteriophage is typically not capable of reproducing using the lysogenic cycle.

[0148] The term “temperate bacteriophage” refers to a bacteriophage that is capable of reproducing using both the lysogenic cycle and the lytic cycle. Lysogeny is characterized by integration of the bacteriophage nucleic acid into the host bacterium's genome or formation of a circular replicon in the bacterial cytoplasm. In this condition the bacterium continues to live and reproduce normally.

[0149] In order to convert a temperate bacteriophage to a lytic bacteriophage (i.e. one not capable of using the lysogenic pathway), the repressor gene may be modified such that it is no longer functional. In one embodiment, the repressor gene (or part thereof) is deleted. Methods of modifying bacteriophage genes are known in the art and include cloning and homologous recombination techniques known in the art of molecular biology. Additional information is provided in “In-vitro translation transcription for phage “rebooting” (Mark Rustad, Allen Eastlund, Paul Jardine, Vincent Noireaux, Cell-free TXTL synthesis of infectious bacteriophage T4 in a single test tube reaction. Synthetic Biology, Volume 3, Issue 1, 2018, ysy002, doidotorg/10.1093/synbio/ysy002).

[0150] It will be appreciated that as well as genetically modifying the bacteriophage to express a payload, the present inventors also contemplate chemically attaching a payload to the phage outer coat. Such payloads may be protein based or non-protein based.

[0151] Exemplary methods of attaching a payload to the phage are described in Aggarwal, N., Hwang, I. Y. & Chang, M. W. Phage-boosted chemotherapy. Nat Biomed Eng 3, 680-681 (2019); Dong X., Pan P., Zheng D.-W., Bao P., Zeng X., Zhang X.-Z. Bioinorganic hybrid bacteriophage for modulation of intestinal microbiota to remodel tumor-immune microenvironment against colorectal cancer. Sci. dv. 2020; 6: eaba1590.; He X., Yang Y., Guo Y., Lu S., Du Y., Li J.-J., Zhang X., Leung N. L. C., Zhao Z., Niu G., et al. Phage-Guided Targeting, Discriminative Imaging, and Synergistic Killing of Bacteria by AIE Bioconjugates. J. Am. Chem. Soc; Dong S., Shi H., Zhang X., Chen X., Cao N., Mao C., Gao X., Wang L. Difunctional bacteriophage conjugated with photosensitizers for Candida albicans-targeting photodynamic inactivation. Int. J. Nanomed. 2018; 13:2199-2216; Anany H., Chen W., Pelton R., Griffiths M. W. Biocontrol of Listeria monocytogenes and Escherichia coli O157:H7 in Meat by Using Phages Immobilized on Modified Cellulose Membranes. Appl. Environ. Microbiol. 2011; 77:6379-6387; and Liana A. E., Marquis C. P., Gunawan C., Gooding J. J., Amal R. Antimicrobial activity of T4 bacteriophage conjugated indium tin oxide surfaces. J. Colloid Interface Sci. 2018; 514:227-233, the contents of which are incorporated herein by reference.

[0152] The bacteriophages described herein may be used to treat subjects having diseases associated with Fusobacterium nucleatum infection.

[0153] Thus, according to another aspect of the present invention, there is provided a method of treating a disease associated with a Fusobacterium nucleatum infection in a subject in need thereof, comprising administering to the subject a therapeutically effective amount of at least one isolated bacteriophage capable of infecting at least one Fusobacterium nucleatum bacterial species causing the infection, wherein the at least one bacteriophage has a genomic nucleic acid sequence at least 85% identical to the nucleic acid sequence as set forth in SEQ ID NOs: 1, 2, 3, 4, 5, 6, 7 or 8, thereby treating the disease associated with the Fusobacterium nucleatum infection.

[0154] According to another aspect of the present invention there is provided a method of treating a disease associated with a Fusobacterium nucleatum infection in a subject in need thereof, comprising administering to the subject a therapeutically effective amount of at least one isolated bacteriophage capable of infecting a Fusobacterium nucleatum bacterial species, wherein the bacteriophage has a genomic nucleic acid sequence at least 85% identical to the genomic nucleic acid sequence of a bacteriophage deposited with the DSMZ under deposit number DSM 33306, DSM 33307, DSM 33582, DSM 33583, DSM 33639, DSM 33640, DSM 33641, DSM 33642 or DSM 33644, thereby treating the disease associated with the Fusobacterium nucleatum infection.

[0155] As used herein, the term “subject” includes mammals, preferably human beings at any age which suffer from the pathology. Preferably, this term encompasses individuals who are at risk to develop the pathology.

[0156] The term “treating” refers to inhibiting, preventing or arresting the development of a pathology (disease, disorder or condition) and/or causing the reduction, remission, or regression of a pathology. Those of skill in the art will understand that various methodologies and assays can be used to assess the development of a pathology, and similarly, various methodologies and assays may be used to assess the reduction, remission or regression of a pathology.

[0157] As used herein, the phrase “disease associated with a Fusobacterium nucleatum infection” refers to a disease which is associated with proliferation of Fusobacterium nucleatum bacteria.

[0158] Diseases associated with Fusobacterium nucleatum infection include diseases in which Fusobacterium nucleatum is present at a disease site (e.g. in a tumor). In one embodiment, the amount of Fusobacterium nucleatum is typically greater than the amount in a healthy subject.

[0159] Such diseases include cancer, periodontal diseases and inflammatory bowel disease.

[0160] Inflammatory bowel diseases (IBD) are severe gastrointestinal disorders characterized by intestinal inflammation and tissue remodeling, that increase in frequency and may prove disabling for patients. The major forms of IBD, ulcerative colitis (UC) and Crohn's disease are chronic, relapsing conditions that are clinically characterized by abdominal pain, diarrhea, rectal bleeding, and fever.

[0161] Exemplary cancers that can be treated with the bacteriophages described herein include, but are not limited to oral and esophageal cancer, colorectal cancer, pancreatic cancer, gastric cancer, gall bladder cancer, breast cancer, lung cancer, bladder cancer and melanoma.

[0162] According to a particular embodiment, the cancer is colorectal cancer.

[0163] The present invention contemplates treatment using more than one of the above disclosed phages, wherein at least two of the phage target a different Fusobacteria nucleatum subspecies.

[0164] In one embodiment, the treating comprises administering at least two, three or four of the above disclosed phages wherein each of the phages in the cocktail target a different Fusobacteria nucleatum subspecies.

[0165] In another embodiment, the treating comprises administering at least two different phages which target a different strain of Fusobacteria nucleatum.

[0166] In another embodiment, the treating comprises administering at least two, three, four, five or more of the above disclosed phages wherein each of the phages target a different strain of Fusobacteria nucleatum.

[0167] The bacteriophage may be used per se or as part of a pharmaceutical composition, where it is mixed with suitable carriers or excipients.

[0168] As used herein a “pharmaceutical composition” refers to a preparation of one or more of the active ingredients described herein with other chemical components such as physiologically suitable carriers and excipients. The purpose of a pharmaceutical composition is to facilitate administration of a compound to an organism.

[0169] Herein the term “active ingredient” refers to the bacteriophage accountable for the biological effect.

[0170] Hereinafter, the phrases “physiologically acceptable carrier” and “pharmaceutically acceptable carrier” which may be interchangeably used refer to a carrier or a diluent that does not cause significant irritation to an organism and does not abrogate the biological activity and properties of the administered compound. An adjuvant is included under these phrases.

[0171] Herein the term “excipient” refers to an inert substance added to a pharmaceutical composition to further facilitate administration of an active ingredient. Examples, without limitation, of excipients include calcium carbonate, calcium phosphate, various sugars and types of starch, cellulose derivatives, gelatin, vegetable oils and polyethylene glycols.

[0172] Techniques for formulation and administration of drugs may be found in “Remington's Pharmaceutical Sciences,” Mack Publishing Co., Easton, PA, latest edition, which is incorporated herein by reference.

[0173] Suitable routes of administration may, for example, include topical, oral, rectal, transmucosal, especially transnasal, intestinal or parenteral delivery, including intramuscular, subcutaneous and intramedullary injections as well as intrathecal, direct intraventricular, intracardiac, e.g., into the right or left ventricular cavity, into the common coronary artery, intravenous, intraperitoneal, intranasal, or intraocular injections.

[0174] Alternately, one may administer the pharmaceutical composition in a local rather than systemic manner, for example, via injection of the pharmaceutical composition directly into a tissue region of a patient. In one embodiment, the bacteriophage may be administered directly into the tumor of the subject.

[0175] Pharmaceutical compositions of some embodiments of the invention may be manufactured by processes well known in the art, e.g., by means of conventional mixing, dissolving, granulating, dragee-making, levigating, emulsifying, encapsulating, entrapping, spray drying, coating or lyophilizing processes.

[0176] Pharmaceutical compositions for use in accordance with some embodiments of the invention thus may be formulated in conventional manner using one or more physiologically acceptable carriers comprising excipients and auxiliaries, which facilitate processing of the active ingredients into preparations which, can be used pharmaceutically. Proper formulation is dependent upon the route of administration chosen.

[0177] For injection, the active ingredients of the pharmaceutical composition may be formulated in aqueous solutions, preferably in physiologically compatible buffers such as Hank's solution, Ringer's solution, or physiological salt buffer. For transmucosal administration, penetrants appropriate to the barrier to be permeated are used in the formulation. Such penetrants are generally known in the art.

[0178] For oral administration, the pharmaceutical composition can be formulated readily by combining the active compounds with pharmaceutically acceptable carriers well known in the art. Such carriers enable the pharmaceutical composition to be formulated as tablets, pills, dragees, capsules, liquids, gels, syrups, slurries, suspensions, and the like, for oral ingestion by a patient. Pharmacological preparations for oral use can be made using a solid excipient, optionally grinding the resulting mixture, and processing the mixture of granules, after adding suitable auxiliaries if desired, to obtain tablets or dragee cores. Suitable excipients are, in particular, fillers such as sugars, including lactose, sucrose, mannitol, or sorbitol; cellulose preparations such as, for example, maize starch, wheat starch, rice starch, potato starch, gelatin, gum tragacanth, methyl cellulose, hydroxypropylmethyl-cellulose, sodium carbomethylcellulose; and/or physiologically acceptable polymers such as polyvinylpyrrolidone (PVP). If desired, disintegrating agents may be added, such as cross-linked polyvinyl pyrrolidone, agar, or alginic acid or a salt thereof such as sodium alginate.

[0179] Dragee cores are provided with suitable coatings. For this purpose, concentrated sugar solutions may be used which may optionally contain gum arabic, talc, polyvinyl pyrrolidone, carbopol gel, polyethylene glycol, titanium dioxide, lacquer solutions and suitable organic solvents or solvent mixtures. Dyestuffs or pigments may be added to the tablets or dragee coatings for identification or to characterize different combinations of active compound doses.

[0180] Pharmaceutical compositions which can be used orally, include push-fit capsules made of gelatin as well as soft, sealed capsules made of gelatin and a plasticizer, such as glycerol or sorbitol. The push-fit capsules may contain the active ingredients in admixture with filler such as lactose, binders such as starches, lubricants such as talc or magnesium stearate and, optionally, stabilizers. In soft capsules, the active ingredients may be dissolved or suspended in suitable liquids, such as fatty oils, liquid paraffin, or liquid polyethylene glycols. In addition, stabilizers may be added. All formulations for oral administration should be in dosages suitable for the chosen route of administration.

[0181] For buccal administration, the compositions may take the form of tablets or lozenges formulated in conventional manner.

[0182] For administration by nasal inhalation, the active ingredients for use according to some embodiments of the invention are conveniently delivered in the form of an aerosol spray presentation from a pressurized pack or a nebulizer with the use of a suitable propellant, e.g., dichlorodifluoromethane, trichlorofluoromethane, dichloro-tetrafluoroethane or carbon dioxide. In the case of a pressurized aerosol, the dosage unit may be determined by providing a valve to deliver a metered amount. Capsules and cartridges of, e.g., gelatin for use in a dispenser may be formulated containing a powder mix of the compound and a suitable powder base such as lactose or starch.

[0183] The pharmaceutical composition described herein may be formulated for parenteral administration, e.g., by bolus injection or continuous infusion. Formulations for injection may be presented in unit dosage form, e.g., in ampoules or in multidose containers with optionally, an added preservative. The compositions may be suspensions, solutions or emulsions in oily or aqueous vehicles, and may contain formulatory agents such as suspending, stabilizing and/or dispersing agents.

[0184] Pharmaceutical compositions for parenteral administration include aqueous solutions of the active preparation in water-soluble form. Additionally, suspensions of the active ingredients may be prepared as appropriate oily or water based injection suspensions. Suitable lipophilic solvents or vehicles include fatty oils such as sesame oil, or synthetic fatty acids esters such as ethyl oleate, triglycerides or liposomes. Aqueous injection suspensions may contain substances, which increase the viscosity of the suspension, such as sodium carboxymethyl cellulose, sorbitol or dextran. Optionally, the suspension may also contain suitable stabilizers or agents which increase the solubility of the active ingredients to allow for the preparation of highly concentrated solutions.

[0185] Alternatively, the active ingredient may be in powder form for constitution with a suitable vehicle, e.g., sterile, pyrogen-free water based solution, before use.

[0186] The pharmaceutical composition of some embodiments of the invention may also be formulated in rectal compositions such as suppositories or retention enemas, using, e.g., conventional suppository bases such as cocoa butter or other glycerides.

[0187] Pharmaceutical compositions suitable for use in context of some embodiments of the invention include compositions wherein the active ingredients are contained in an amount effective to achieve the intended purpose. More specifically, a therapeutically effective amount means an amount of active ingredients (bacteriophage) effective to prevent, alleviate or ameliorate symptoms of a disorder (e.g., cancer) or prolong the survival of the subject being treated.

[0188] Determination of a therapeutically effective amount is well within the capability of those skilled in the art, especially in light of the detailed disclosure provided herein.

[0189] For any preparation used in the methods of the invention, the therapeutically effective amount or dose can be estimated initially from in vitro and cell culture assays. For example, a dose can be formulated in animal models to achieve a desired concentration or titer. Such information can be used to more accurately determine useful doses in humans.

[0190] In some embodiments, the pharmaceutical composition is delivered to a subject in need thereof so as to provide one or more bacteriophage in an amount corresponding to a multiplicity of infection (MOI) of about 1 to about 10. MOI is determined by assessing the approximate bacterial load in the tumor, or using an estimate for a given type of disease (cancer); and then providing phage in an amount calculated to give the desired MOI.

[0191] In some embodiments, MOI may be selected based on the “multiplicity of 10 rule”, which states that where there are on average in order of 10 phages adsorbed per bacterium, bacterial density reduces significantly (Abedon S T, 2009, Foodborne Pathog Dis 6:807-815; and Kasman L M, et al., 2002, J Virol 76:5557-5564); whereas lower-titer phage administration (e.g., using a MOI lower than 10) is unlikely to be successful (Goode D, et al., 2003, App Environ Microbiol 69:5032-5036; Kumari S, et al., 2010, J Infect Dev Ctries 4:367-377).

[0192] In other embodiments, the amount of phage is provided so as to reduce the amount of bacteria (e.g. Fusobacterium nucleatum) present in the tumor by at least 10%, 20%, 30%, 40%, 50%, 60%, 70%, 80%, 90% or even 100%.

[0193] Toxicity and therapeutic efficacy of the active ingredients described herein can be determined by standard pharmaceutical procedures in vitro, in cell cultures or experimental animals. The data obtained from these in vitro and cell culture assays and animal studies can be used in formulating a range of dosage for use in human. The dosage may vary depending upon the dosage form employed and the route of administration utilized. The exact formulation, route of administration and dosage can be chosen by the individual physician in view of the patient's condition. (See e.g., Fingl, et al., 1975, in “The Pharmacological Basis of Therapeutics”, Ch. 1 p. 1).

[0194] Dosage amount and interval may be adjusted individually to provide levels of the active ingredient are sufficient to induce or suppress the biological effect (minimal effective concentration, MEC). The MEC will vary for each preparation, but can be estimated from in vitro data. Dosages necessary to achieve the MEC will depend on individual characteristics and route of administration. Detection assays can be used to determine plasma concentrations.

[0195] Depending on the severity and responsiveness of the condition to be treated, dosing can be of a single or a plurality of administrations, with course of treatment lasting from several days to several weeks or until cure is effected or diminution of the disease state is achieved.

[0196] The amount of a composition to be administered will, of course, be dependent on the subject being treated, the severity of the affliction, the manner of administration, the judgment of the prescribing physician, etc.

[0197] Compositions of some embodiments of the invention may, if desired, be presented in a pack or dispenser device, such as an FDA approved kit, which may contain one or more unit dosage forms containing the active ingredient. The pack may, for example, comprise metal or plastic foil, such as a blister pack. The pack or dispenser device may be accompanied by instructions for administration. The pack or dispenser may also be accommodated by a notice associated with the container in a form prescribed by a governmental agency regulating the manufacture, use or sale of pharmaceuticals, which notice is reflective of approval by the agency of the form of the compositions or human or veterinary administration. Such notice, for example, may be of labeling approved by the U.S. Food and Drug Administration for prescription drugs or of an approved product insert. Compositions comprising a preparation of the invention formulated in a compatible pharmaceutical carrier may also be prepared, placed in an appropriate container, and labeled for treatment of an indicated condition, as is further detailed above.

[0198] Compositions described herein may comprise more than one phage strain. In one embodiment, the composition comprises 2 phage strains, 3 phage strains, 4 phage strains, 5 phage strains or more.

[0199] In one embodiment, the bacteriophage cocktails comprise phages that target a single Fusobacteria nucleatum subspecies i.e. only Fusobacteria nucleatum nucleatum subspecies, only Fusobacteria nucleatum animalis subspecies, only Fusobacteria nucleatum vincentii subspecies, or only Fusobacteria nucleatum polymorphum subspecies.

[0200] In one embodiment, the bacteriophage cocktails comprise phages that target more than one Fusobacteria nucleatum subspecies.

[0201] Thus, for example a bacteriophage cocktail may comprise at least two phages which target a different Fusobacteria nucleatum subspecies.

[0202] Alternatively, the bacteriophage cocktail may comprise at least two, three or four phages wherein each of the phages in the cocktail target a different Fusobacteria nucleatum subspecies.

[0203] In another embodiment, the bacteriophage cocktails comprise at least two different phages targeting a different strain of Fusobacteria nucleatum.

[0204] Alternatively, the bacteriophage cocktail may comprise at least two, three, four, five or more phages wherein each of the phages in the cocktail target a different strain of Fusobacteria nucleatum.

[0205] The pharmaceutical compositions of the present invention also may be combined with one or more non-phage therapeutic and/or prophylactic agents, useful for the treatment and/or prevention of bacterial infections, as described herein and/or known in the art (e.g. one or more traditional antibiotic agents). Other therapeutic and/or prophylactic agents that may be used in combination with the phage(s) or phage product(s) of the invention include, but are not limited to, antibiotic agents, anti-inflammatory agents, antiviral agents, antifungal agents, or local anesthetic agents. In some preferred embodiments, the pharmaceutical composition is formulated for treatment of cancer (e.g. intratumoral formulation) and comprises one or more additional therapeutic and/or prophylactic agents selected from anti-cancer agents antibiotic agents, antifungal agents, and local anesthetic agents. In some embodiments, the pharmaceutical composition comprises a phage cocktail combination of the invention, which is administered in the absence of a standard or traditional antibiotic agent.

[0206] Anti-cancer drugs that can be co-administered with the bacteriophages of the invention include, but are not limited to Acivicin; Aclarubicin; Acodazole Hydrochloride; Acronine; Adriamycin; Adozelesin; Aldesleukin; Altretamine; Ambomycin; Ametantrone Acetate; Aminoglutethimide; Amsacrine; Anastrozole; Anthramycin; Asparaginase; Asperlin; Azacitidine; Azetepa; Azotomycin; Batimastat; Benzodepa; Bicalutamide; Bisantrene Hydrochloride; Bisnafide Dimesylate; Bizelesin; Bleomycin Sulfate; Brequinar Sodium; Bropirimine; Busulfan; Cactinomycin; Calusterone; Caracemide; Carbetimer; Carboplatin; Carmustine; Carubicin Hydrochloride; Carzelesin; Cedefingol; Chlorambucil; Cirolemycin; Cisplatin; Cladribine; Crisnatol Mesylate; Cyclophosphamide; Cytarabine; Dacarbazine; Dactinomycin; Daunorubicin Hydrochloride; Decitabine; Dexormaplatin; Dezaguanine; Dezaguanine Mesylate; Diaziquone; Docetaxel; Doxorubicin; Doxorubicin Hydrochloride; Droloxifene; Droloxifene Citrate; Dromostanolone Propionate; Duazomycin; Edatrexate; Eflornithine Hydrochloride; Elsamitrucin; Enloplatin; Enpromate; Epipropidine; Epirubicin Hydrochloride; Erbulozole; Esorubicin Hydrochloride; Estramustine; Estramustine Phosphate Sodium; Etanidazole; Etoposide; Etoposide Phosphate; Etoprine; Fadrozole Hydrochloride; Fazarabine; Fenretinide; Floxuridine; Fludarabine Phosphate; Fluorouracil; Flurocitabine; Fosquidone; Fostriecin Sodium; Gemcitabine; Gemcitabine Hydrochloride; Hydroxyurea; Idarubicin Hydrochloride; Ifosfamide; Ilmofosine; Interferon Alfa-2a; Interferon Alfa-2b; Interferon Alfa-n1; Interferon Alfa-n3; Interferon Beta-I a; Interferon Gamma-I b; Iproplatin; Irinotecan Hydrochloride; Lanreotide Acetate; Letrozole; Leuprolide Acetate; Liarozole Hydrochloride; Lometrexol Sodium; Lomustine; Losoxantrone Hydrochloride; Masoprocol; Maytansine; Mechlorethamine Hydrochloride; Megestrol Acetate; Melengestrol Acetate; Melphalan; Menogaril; Mercaptopurine; Methotrexate; Methotrexate Sodium; Metoprine; Meturedepa; Mitindomide; Mitocarcin; Mitocromin; Mitogillin; Mitomalcin; Mitomycin; Mitosper; Mitotane; Mitoxantrone Hydrochloride; Mycophenolic Acid; Nocodazole; Nogalamycin; Ormaplatin; Oxisuran; Paclitaxel; Pegaspargase; Peliomycin; Pentamustine; Peplomycin Sulfate; Perfosfamide; Pipobroman; Piposulfan; Piroxantrone Hydrochloride; Plicamycin; Plomestane; Porfimer Sodium; Porfiromycin; Prednimustine; Procarbazine Hydrochloride; Puromycin; Puromycin Hydrochloride; Pyrazofurin; Riboprine; Rogletimide; Safingol; Safingol Hydrochloride; Semustine; Simtrazene; Sparfosate Sodium; Sparsomycin; Spirogermanium Hydrochloride; Spiromustine; Spiroplatin; Streptonigrin; Streptozocin; Sulofenur; Talisomycin; Taxol; Tecogalan Sodium; Tegafur; Teloxantrone Hydrochloride; Temoporfin; Teniposide; Teroxirone; Testolactone; Thiamiprine; Thioguanine; Thiotepa; Tiazofuirin; Tirapazamine; Topotecan Hydrochloride; Toremifene Citrate; Trestolone Acetate; Triciribine Phosphate; Trimetrexate; Trimetrexate Glucuronate; Triptorelin; Tubulozole Hydrochloride; Uracil Mustard; Uredepa; Vapreotide; Verteporfin; Vinblastine Sulfate; Vincristine Sulfate; Vindesine; Vindesine Sulfate; Vinepidine Sulfate; Vinglycinate Sulfate; Vinleurosine Sulfate; Vinorelbine Tartrate; Vinrosidine Sulfate; Vinzolidine Sulfate; Vorozole; Zeniplatin; Zinostatin; Zorubicin Hydrochloride. Additional antineoplastic agents include those disclosed in Chapter 52, Antineoplastic Agents (Paul Calabresi and Bruce A. Chabner), and the introduction thereto, 1202-1263, of Goodman and Gilman's “The Pharmacological Basis of Therapeutics”, Eighth Edition, 1990, McGraw-Hill, Inc. (Health Professions Division).

[0207] Standard or traditional antibiotic agents that can be administered with the bacteriophages described herein include, but are not limited to, amikacin, gentamicin, kanamycin, neomycin, netilmicin, paromomycin, rhodostreptomycin, streptomycin, tobramycin, apramycin, rifamycin, naphthomycin, mupirocin, geldanamycin, ansamitocin, carbacephems, imipenem, meropenem, ertapenem, faropenem, doripenem, panipenem/betamipron, biapenem, PZ-601, cephalosporins, cefacetrile, cefadroxil, cefalexin, cefaloglycin, cefalonium, cefaloridine, cefalotin, cefapirin, cefatrizine, cefazaflur, cefazedone, cefazolin, cefradine, cefroxadine, ceftezole, cefaclor, cefonicid, cefprozil, cefuroxime, cefuzonam, cefmetazole, cefotetan, cefoxitin, cefcapene, cefdaloxime, cefdinir, cefditoren, cefetamet, cefixime, cefmenoxime, cefteram, ceftibuten, ceftiofur, ceftiolene, ceftizoxime, ceftriaxone, cefoperazone, ceftazidime latamoxef, cefclidine, cefepime, cefluprenam, cefoselis, cefozopran, cefpirome, cefquinome, flomoxef. ceftobiprole, azithromycin, clarithromycin, dirithromycin, erythromycin, roxithromycin, aztreonam, pencillin and penicillin derivatives, actinomycin, bacitracin, colistin, polymyxin B, cinoxacin, flumequine, nalidixic acid, oxolinic acid, piromidic acid, pipemidic acid, rosoxacin, ciprofloxacin, enoxacin, fleroxacin, lomefloxacin, nadifloxacin, norfloxacin, ofloxacin, pefloxacin, rufloxacin, balofloxacin, gatifloxacin, grepafloxacin, levofloxacin, moxifloxacin, pazufloxacin, sparfloxacin, temafloxacin, tosufloxacin, clinafloxacin, garenoxacin, gemifloxacin, stifloxacin, trovalfloxacin, prulifloxacin, acetazolamide, benzolamide, bumetanide, celecoxib, chlorthalidone, clopamide, dichlorphenamide, dorzolamide, ethoxyzolamide, furosemide, hydrochlorothiazide, indapamide, mafendide, mefruside, metolazone, probenecid, sulfacetamide, sulfadimethoxine, sulfadoxine, sulfanilamides, sulfamethoxazole, sulfasalazine, sultiame, sumatriptan, xipamide, tetracycline, chlortetracycline, oxytetracycline, doxycycline, lymecycline, meclocycline, methacycline, minocycline, rolitetracycline, methicillin, nafcillin, oxacilin, cloxacillin, vancomycin, teicoplanin, clindamycin, co-trimoxazole, flucloxacillin, dicloxacillin, ampicillin, amoxicillin and any combination thereof.

[0208] Standard antifungal agents include amphotericin B such as liposomal amphotericin B and non-liposomal amphotericin B.

[0209] The bacteriophage and bacteriophage cocktails of the invention can be used in anti-infective compositions for controlling the growth of bacteria, in particular Fusobacterium nucleatum, in order to prevent or reduce the incidence of nosocomial infections. The anti-infective compositions find use in reducing or inhibiting colonization or growth of bacterial on a surface contacted therewith. The bacteriophages of the invention may be incorporated into compositions that are formulated for application to biological surfaces, such as the skin and mucus membranes, as well as for application to non-biological surfaces.

[0210] Anti-infective formulations for use on biological surfaces include, but are not limited to, gels, creams, ointments, sprays, and the like. In particular embodiments, the anti-infective formulation is used to sterilize a surgical field, or the hands and/or exposed skin of healthcare workers and/or patients.

[0211] Anti-infective formulations for use on non-biological surfaces include sprays, solutions, suspensions, wipes impregnated with a solution or suspension and the like. In particular embodiments, the anti-infective formulation is used on solid surfaces in hospitals, nursing homes, ambulances, etc., including, e.g., appliances, countertops, and medical devices, hospital equipment. In preferred embodiments, the non-biological surface is a surface of a hospital apparatus or piece of hospital equipment. In particularly preferred embodiments, the non-biological surface is a surgical apparatus or piece of surgical equipment.

[0212] The present invention also encompasses diagnostic methods for determining the causative agent at the site of the bacterial infection. In certain embodiments, the diagnosis of the causative agent of a bacterial infection is performed by (i) culturing a sample from a patient, e.g., a tumor biopsy or other sample appropriate for culturing the bacteria causing the infection; (ii) contacting the culture with one or more bacteriophages of the invention; and (iii) monitoring for evidence of cell growth and/or lysis of the culture. Because the activity of phages tends to be species or strain specific, susceptibility, or lack of susceptibility, to one or more phages of the invention can indicate the species or strain of bacteria causing the infection.

[0213] The sample may be a tissue biopsy or swab collected from the patient, or a fluid sample, such as blood, tears, or urine.

[0214] As used herein the term “about” refers to ±10%.

[0215] The terms “comprises”, “comprising”, “includes”, “including”, “having” and their conjugates mean “including but not limited to”.

[0216] The term “consisting of” means “including and limited to”.

[0217] The term “consisting essentially of” means that the composition, method or structure may include additional ingredients, steps and/or parts, but only if the additional ingredients, steps and/or parts do not materially alter the basic and novel characteristics of the claimed composition, method or structure.

[0218] As used herein, the singular form “a”, “an” and “the” include plural references unless the context clearly dictates otherwise. For example, the term “a compound” or “at least one compound” may include a plurality of compounds, including mixtures thereof.

[0219] Throughout this application, various embodiments of this invention may be presented in a range format. It should be understood that the description in range format is merely for convenience and brevity and should not be construed as an inflexible limitation on the scope of the invention. Accordingly, the description of a range should be considered to have specifically disclosed all the possible subranges as well as individual numerical values within that range. For example, description of a range such as from 1 to 6 should be considered to have specifically disclosed subranges such as from 1 to 3, from 1 to 4, from 1 to 5, from 2 to 4, from 2 to 6, from 3 to 6 etc., as well as individual numbers within that range, for example, 1, 2, 3, 4, 5, and 6. This applies regardless of the breadth of the range.

[0220] Whenever a numerical range is indicated herein, it is meant to include any cited numeral (fractional or integral) within the indicated range. The phrases “ranging/ranges between” a first indicate number and a second indicate number and “ranging/ranges from” a first indicate number “to” a second indicate number are used herein interchangeably and are meant to include the first and second indicated numbers and all the fractional and integral numerals therebetween.

[0221] As used herein the term “method” refers to manners, means, techniques and procedures for accomplishing a given task including, but not limited to, those manners, means, techniques and procedures either known to, or readily developed from known manners, means, techniques and procedures by practitioners of the chemical, pharmacological, biological, biochemical and medical arts.

[0222] When reference is made to particular sequence listings, such reference is to be understood to also encompass sequences that substantially correspond to its complementary sequence as including minor sequence variations, resulting from, e.g., sequencing errors, cloning errors, or other alterations resulting in base substitution, base deletion or base addition, provided that the frequency of such variations is less than 1 in 50 nucleotides, alternatively, less than 1 in 100 nucleotides, alternatively, less than 1 in 200 nucleotides, alternatively, less than 1 in 500 nucleotides, alternatively, less than 1 in 1000 nucleotides, alternatively, less than 1 in 5,000 nucleotides, alternatively, less than 1 in 10,000 nucleotides.

[0223] It is understood that any Sequence Identification Number (SEQ ID NO) disclosed in the instant application can refer to either a DNA sequence or a RNA sequence, depending on the context where that SEQ ID NO is mentioned, even if that SEQ ID NO is expressed only in a DNA sequence format or a RNA sequence format. Similarly, though some sequences are expressed in a RNA sequence format (e.g., reciting U for uracil), depending on the actual type of molecule being described, it can refer to either the sequence of a RNA molecule comprising a dsRNA, or the sequence of a DNA molecule that corresponds to the RNA sequence shown. In any event, both DNA and RNA molecules having the sequences disclosed with any substitutes are envisioned.

[0224] It is appreciated that certain features of the invention, which are, for clarity, described in the context of separate embodiments, may also be provided in combination in a single embodiment. Conversely, various features of the invention, which are, for brevity, described in the context of a single embodiment, may also be provided separately or in any suitable subcombination or as suitable in any other described embodiment of the invention. Certain features described in the context of various embodiments are not to be considered essential features of those embodiments, unless the embodiment is inoperative without those elements.

[0225] Various embodiments and aspects of the present invention as delineated hereinabove and as claimed in the claims section below find experimental support in the following examples.

### EXAMPLES

[0226] Reference is now made to the following examples, which together with the above descriptions illustrate some embodiments of the invention in a non-limiting fashion. General references are provided throughout this document. The procedures therein are believed to be well known in the art and are provided for the convenience of the reader. All the information contained therein is incorporated herein by reference.

### Example 1

### Isolating and Characterizing Phage

[0227] Using the methodology described in Machuca et al., [App Env Microbiol, 2010 November; 76(21):7243-50] on fresh saliva samples, 10 new phage have been isolated, including phage against each of the 4 different FN subspecies—vincentii, animalis, nucleatum and polymorphum. The host bacteria used to isolate phage, the subspecies against which they demonstrate infectivity and phage characteristics are shown below in Table 1. All assessments of infectivity were carried by applying 5 μl of phage at 10⁶ pfu/mL of phage on a bacterial lawn of the bacteria being used for screening. The bacterial lawn was inspected for appearance of clear plaques which indicate amplification of phage on the bacteria. The phages are each further described below.

TABLE 1
Exemplary Isolated Bacteriophage against FN Subspecies.

| | | | | | Tissue | | | | |
|---|---|---|---|---|---|---|---|---|---|
| | DNA/ | Temperature/ | | | source of | Also | Additional | SEQ ID | Deposit |
| Name | RNA | Lytic | Infects | Host | host | recognizes | information | NO: | no. |
| FN1-1 | DNA | T | FN1 | CCUG 32880/ | sinusitis | | | 1 | DSM |
| | | | (vincentii) | ATCC 51190 | of upper | | | | 33306 |
| | | | | (DSMZ DSM | jaw | | | | |
| | | | | 33250) | | | | | |
| FN14-1 | DNA | T | FN14 | Genbank accession | colonic | | | 2 | DSM |
| | | | (vincentii) | GCA_000347315.1 | tumor | | | | 33639 |
| FN14-2 | DNA | L | FN14 | Genbank accession | colonic | FN2 | | 3 | DSM |
| | | | (vincentii) | GCA_000347315.1 | tumor | (vincentii) | | | 33640 |
| FN14-3 | DNA | L | FN14 | Genbank accession | colonic | | | 4 | DSM |
| | | | (vincentii) | GCA_000347315.1 | tumor | | | | 33641 |
| FN14-4 | DNA | L | FN14 | Genbank accession | colonic | | | 5 | DSM |
| | | | (vincentii) | GCA_000347315.1 | tumor | | | | 33642 |
| FN14-6 | DNA | T | FN14 | Genbank accession | colonic | | | 6 | DSM |
| | | | (vincentii) | GCA_000347315.1 | tumor | | | | 33644 |
| FN2-58* | RNA | L | FN2 | CCUG 37843/ | inflamed | FN8 | 3 | 15 | DSM |
| | | | (vincentii) | ATCC 49256 | gingiva | (nucleatum) | genomic | 16 | 33582 |
| | | | | | | | segments | 17 | |
| FN5-1 | DNA | T | FN5 | BEI HM-992 | colonic | | | 7 | DSM |
| | | | (animalis) | (DSMZ DSM | tumor | | | | 33307 |
| | | | | 33251) | | | | | |
| FN7-1 | RNA | L | FN7 | BEI HM-74 | normal | FN8 | 3 | 18 | DSM |
| | | | (animalis) | | colon | (nucleatum); | genomic | 19 | 33583 |
| | | | | | | FNC1*** | segments | 20 | |
| | | | | | | (polymorphum); | | | |
| | | | | | | FNC2*** | | | |
| | | | | | | (polymorphum) | | | |

*Same saliva host;
** Derived from FN7-1;
***FNC strains from BiomX saliva.

[0228] As can be seen from Table 1, each of the four F. nucleatum subspecies is targeted by multiple phages of the disclosure. FN subspecies vincentii is targeted by the first 7 phages listed (including 2 from the same donor). FN subspecies animalis is targeted by FN5-1 and FN7-1. FN subspecies nucleatum is targeted by FN7-1, FN2-58. FN subspecies polymorphum is targeted by FN7-1.

[0229] Also, some of phages are temperate, as determined by sequence analyses that revealed the presence of integrases required for lysogenic integration. Three of the phages are double stranded (DS) lytic RNA phages. Lytic RNA phages against FN have never previously been reported. Two of the RNA phages have a broad target host range under the present conditions for examining sensitivity to phage infectivity and can infect representatives of more than a single FN subspecies.

[0230] DNA Phages

[0231] 1. Phage FN1-1—Double Stranded DNA Temperate Phage:

[0232] Phage FN1-1 (deposit number DSM 33306), isolated on FN1 Fusobacterium nucleatum subsp. vincentii (CCUG 32880/ATCC 51190, DSMZ DSM 33250), is a double stranded temperate DNA phage with a length of about 36,000 bp. The phage is packed by a cos packaging mechanism with the sequence SEQ ID NO: ATACCGCTTCCCCTCTTT (SEQ ID NO: 8) based on Oxford Nano-pore sequencing and PhageTerm [JR Garneau, et al., Sci Rep 2017 Aug. 15, 7(1):8292]analysis).

[0233] FN1-1 has 52 open reading frames (ORFs) above 80 amino acids in length out of which only 8 are identified by BLASTX. One of these 8 genes is an integrase gene which indicates that this phage is a temperate phage. While temperate, FN1-1 causes a collapse of the host growth curve as shown in FIG. 1.

[0234] FN1-1 infection kinetics at different Multiplicities of Infection (ratios of phage to target bacteria) in liquid culture are shown in FIG. 1. A control sample with only BHIS buffer results in OD reading close to zero.

[0235] 2. Phage FN14-1—Double Stranded DNA Temperate Phage

[0236] Phage FN14-1 (deposit number DSM 33639) is a double stranded DNA temperate phage with a genome length of about 39,000 bp that was isolated on FN14 Fusobacterium nucleatum subsp. vincentii GenBank accession GCA_000347315.1.

[0237] The phage encodes 59 ORF above 80 amino acids in length. An integrase gene and a repressor gene were identified.

[0238] 3. Phage FN14-2—Double Stranded DNA Lytic Phage

[0239] Phage FN14-2 (deposit number DSM 33640) is a double strand DNA lytic phage with a genome length of about 126,000 bp. The phage was isolated on FN14 Fusobacterium nucleatum subsp. vincentii Genbank accession GCA_000347315.1 and is able to infect both its original host and FN2 F. nucleatum subsp. vincentiii (CCUG 37843/ATCC 49256).

[0240] 4. Phage FN14-3—Double Stranded DNA Lytic Phage

[0241] Phage FN14-3 (deposit number DSM 33641) is a double strand DNA lytic phage with a genome length of about 80,000 bp that was isolated on FN-14 Fusobacterium nucleatum subsp. vincentii Genbank accession GCA_000347315.1. No integrase gene was detected in the sequence of FN14-3.

[0242] 5. Phage FN14-4—Double Strand DNA Lytic Phage

[0243] Phage FN14-4 (deposit number DSM 33642) is a double stranded DNA lytic phage with a genome length of about 125,000 bp that was isolated on FN14-4 Fusobacterium nucleatum subsp. vincentii Genbank accession GCA_000347315.1. No integrase gene was detected in its genome.

[0244] 6. Phage FN14-6—Double Stranded DNA Temperate Phage

[0245] Phage FN14-6 (deposit number DSM 33644) is a double stranded DNA temperate phage with a genome length of about 38,000 bp was isolated on FN14 Fusobacterium nucleatum subsp. vincentii Genbank accession GCA_000347315.1. An integrase gene and a repressor gene was detected

[0246] 7. Phage FN5-1—Double Stranded DNA Temperate Phage

[0247] Phage FN5-1 (deposit number DSM 33307) is a double stranded DNA phage with a genome length of about 39,000 bp that was isolated on FN5 Fusobacterium nucleatum subsp. animalis (BEI HM-992, DSMZ DSM 33251). Its genome has 58 ORF above 80 amino acids in length. An integrase gene was detected and integration into the genome was confirmed. The phage integrates into the host genome between the host copper amine oxidase (GenBank: PGH26162.1) gene and endonuclease MutS2 [Fusobacterium nucleatum] (GenBank: PIM90054.1) gene. A repressor, also required for lysogeny, was identified.

[0248] B. Double-Stranded RNA Phages:

[0249] Each of the three RNA double stranded phages (FN2-58 and FN7-1) contains 3 chromosomes of about 3.5 KB, 4.5 KB and 7 KB in length. This is the first known disclosure of an RNA phage against Fusobacterium subsp. nucleatum. BLAST analysis of the phages' contigs did not yield any specific hits but a few random hits of about 50 bp homology regions to bacterial genomes.

[0250] 1. Phage FN7-1 Double-Stranded RNA Lytic Phage

[0251] Phage FN7-1 DS RNA (DSM 33583) was isolated on FN7 F. nucleatum subsp. animalis (BEI HM-74) and also infects FN8 F. nucleatum subsp. nucleatum (BEI HM-993) and FNC1 (F. nucleatum subsp. polymorphum, DSMZ DSM 33248). Phage FN7-1 also infects FNC2 (F. nucleatum subsp. polymorphum, DSMZ DSM 33249) at a lower efficiency (Efficiency of Plating (“EOP”) of 0.01 compared to EOP of 1 on FN7 (i.e., two orders of magnitude lower than on FN7).

[0252] 2. Phage FN2-58 Double-Stranded RNA Lytic Phage

[0253] FN2-58 DS RNA phage (Deposit No. DSM 33582) was isolated on FN2 F. nucleatum subsp. vincentii (CCUG 37843/ATCC 49256). FN2-58 infects FN2 at an EOP of 0.01 and infects FN8 at an EOP of 0.01. FN2-58 has 95% identity to FN7-1 phage.

### Example 2

[0254] Demonstration of Phage Targeting to FN Bacteria-Bearing Tumors

[0255] The phages of the present disclosure were shown to target intra-tumorally located FN bacteria. A syngeneic subcutaneous mouse tumor model was utilized to assess the efficacy of phage delivery into F. nucleatum bearing tumors.

[0256] Syngeneic Animal Tumor Model

[0257] A syngeneic subcutaneous model was utilized in this study. One week prior to study initiation, murine colon carcinoma CT26 cells (ATCC CRL-2638) were thawed and cultured. On day 0, cells were trypsinized, centrifuged and resuspended in phosphate buffered saline (PBS). A dose of 5×10⁵ cells/mouse in 0.1 mL was injected subcutaneously to the right flank of female Balb/c mice. Animals were observed for tumor appearance and tumors were measured for parameters of length (L) and width (W) using a caliper, three times a week until study termination.

[0258] Preparation and administration of F. nucleatum bacteria (FN5): FN5 (BEI HM-992) was cultured from a frozen stock in BHIS media supplemented with 0.1% L-cysteine on an anaerobic BHIS plate. Incubation was carried out in Lock & Lock Boxes at 37° C. inside an aerobic incubator for 2-3 days. A starter culture, prepared from the plate, was diluted 1:100 into fresh media, and incubated overnight. The next morning bacteria were prepared by centrifugation and resuspension in PBS.

[0259] Administration of bacteria into mice was carried out after group allocation, so that mice with the largest or the smallest tumors were excluded from the study, and the rest of the animals were inoculated with F. nucleatum FN5 via slow (0.2 mL/minute) tail vein intravenous (IV) injection. Bacteria were administered on day 12 after tumor induction. Different CFU doses (5×10⁶, 5×10⁷ and 5×10⁸) were tested to identify the optimal dose for tumor colonization.

[0260] F. nucleatum FN5 was incorporated into subcutaneous murine colon carcinoma tumors (CT26) following IV injection and survival of bacteria in the tumor environment was shown. Slowly injected F. nucleatum bacteria showed co-localization in a dose dependent manner (FIGS. 2A and 2B). Injection of the highest dose, 5×10⁸ CFU/animal, inhibited growth of the CT26 derived tumor (FIG. 2C). An intermediate dose of 5×10⁷ CFU/animal was selected for further studies.

[0261] Preparation and administration of FN5-1 phage: For administration of phage, 300 ml of a filtered lysate was concentrated using a 100 KDa Centrifugal Filter Unit (Amicon UFC910024) to a final volume of 2 ml. Removal of endotoxins was carried out using Hyglos EndoTrap HD Resin with the manufacturer's protocol. Buffer exchange was carried out to transfer purified phage at a concentration of 7.5×10¹¹ PFU/mL into SM-buffer (100 mM NaCl, 50 mM MgSO₄, 25 mM Tris-HCl, LAL water) at a final phage concentration of 6.5×10⁹. Endotoxin test showed that phage was endotoxin free (<0.05 EU/mL, using Endosafe®-PTS™ instrument).

[0262] FN5-1 phage (in 50 mM Tris-HCl, 100 mM NaCl, 5 mM MgCl₂, 0.1 mM MnCl₂ pH=7.5 and provided at a titer of 10⁹ PFU/mL) were administered by IV injection one day following FN5 dosing to the CT26 tumor-containing mice via slow tail vein injection (0.2 mUanimal) (FIG. 3A). Selected organs were collected, weighed, and processed for colony forming units (CFU) count, or for qPCR as described below.

[0263] Tumors were harvested 24 hours following phage administration, weighed, and processed for colony forming units (CFU) count, or for qPCR as described below. Phage were shown to home to tumors and integrate into the FN bacteria incorporated therein. Detection of lysogenized intra-tumor F. nucleatum by qPCR using one set of primers in the phage SEQ ID NO: 9 CTATTTGTTGGCTACCTAATTAAG and one in the bacterial DNA adjacent to the integration site SEQ ID NO: 10 AAATACTATCCTGACTGGTGTAAG (FIG. 3B) were used to detect integration of FN5-1 into the FN5 bacteria. The probe sequence utilized was SEQ ID NO: 11 TAGCCATCTGGATCTGTTAGAATT.

[0264] The amount of temperate phage integrated into the FN genome was determined for both FN5-1 phage treated and control animals after normalizing to the total FN content. FN content was determined by detection of the NusG gene (GenBank accession AAL94126.1), a unique gene of F. nucleatum with no match to any gene of any other species, by qPCR. qPCR of NusG gene was carried out by utilizing the following forward primer, reverse primer & probe: SEQ ID NO:12 CCTCGTGTATGGTATGAAGT, SEQ ID NO:13 ATCAACCATTACTTTAACTCTAC, and SEQ ID NO:14 ATCAAGAAGGACAAGTTGCTGA, respectively. Statistical analysis was performed using a two-tailed t-test. A statistically significant increase (P<0.0001) in temperate phage was observed in tumors derived from mice to which both FN and phage had been administered compared to mice that received FN only (FIG. 3C).

### Example 3

### Conversion of a Temperate Phage to a Lytic Phage

[0265] The conversion of a temperate phage of this disclosure into a lytic phage may be achieved by a complete deletion of the repressor present in the temperate phage. This technique yields lytic phages that are useful for lysing and killing various FN subspecies that are associated with a disease or condition.

[0266] One way to achieve the conversion of a temperate phage to a lytic phage is by engineering the phage genome in Saccharomyces cerevisiae: a temperate E. coli lambda phage was converted into an obligatorily lytic phage by complete deletion of the repressor and re-assembly of its genome in yeast. The lambda phage genome was divided into 8 parts of approximately 6 KB each by PCR. The CI repressor gene was not amplified. The phage was assembled inside yeast on the backbone of a pYES1L vector (GenArt) as demonstrated by the protocol described in H. Ando et al., Cell Sys 2015 Sep. 23; 1(3):187-96. The assembled plasmid was then obtained by miniprep from yeast and transformed into electrocompetent E. coli 10G cells (Lucigen) to produce viable phage as described in H. Ando et al. The new phage with the repressor deletion exhibited the same infection kinetics as the Lambda Vir mutant, a known lytic mutant with a mutation in its operator sequences (FIG. 4).

[0267] Another way to achieve the conversion of a temperate phage to a lytic phage is by disrupting at least one gene essential for the lysogenic cycle, as described in Example 4.

### Example 4

### Insertion of a Payload into a Phage and Disruption of Integrase

[0268] A screenable 8 bp foreign DNA payload segment that can be detected by PCR (a “screener”) was inserted into an FN temperate phage inside its integrase gene in such a way as to inactivate this gene and make the phage obligatorily lytic. Homologous recombination was used. An FN shuttle plasmid was generated as shown in FIG. 5 by combining a chloramphenicol resistance gene, FN origin of replication from a native FN plasmid and E. coli origin of replication (pMB1). The 500 bp flanking the integrase gene on either side was also cloned into the construct to promote homologous recombination. An FN strain was transformed with this plasmid and infected with an FN temperate phage at MOI 0.1 to promote homologous recombination. The lysate of this infection was used to infect an additional FN strain that does not contain a plasmid. The lysate that was produced was screened by PCR to validate the presence of the recombinant payload bearing phage. Following such validation, individual plaques were tested for the presence of the “screener” to identify the recombinant lytic payload bearing phage.

### Example 5

### Identification of FN Subspecies

[0269] Identification of which FN subspecies is present in a tumor of each patient was carried out by PCR of the NusG gene followed by sequencing of the amplicon. Alignment of the sequence of the approximately 112 bp NusG amplicon in representatives of each subspecies (10 nucleatum, 22 animalis, 21 polymorphum and 13 vincentii bacteria) revealed single nucleotide differences that can be used to distinguish between them.

[0270] In addition, targeted next generation sequencing (NGS) of the NusG gene was applied to quantify the relative abundance of F. nucleatum subspecies in tumor and normal tissues. Combined with qPCR data, the absolute abundance for each of the subspecies was determined. With this data, the present inventors show that F. nucleatum subspecies animalis is the most prevalent subspecies in colorectal cancer tumors. Moreover, it was determine that it is a good candidate to be targeted by F. nucleatum phages given that at each absolute abundance cutoff it is consistently present in more tumors than the other subspecies.

### Example 6

[0271] Fusobacterium can Express Anti-Cancer Heterologous Gene

[0272] The amino acid sequences of the murine (Asn49Ser162, NCBI accession #P48346) and human (Asn49Ser162, NCBI accession #P40933) Interleukin-15 (IL-15) and cytosine deaminase were optimized for expression in Fusobacterium (using codon optimization bioinformatic tools) and cloned into the Fusobacterium expression vector MBQ. Cytosine deaminase converts the nontoxic prodrug 5-fluorocytosine (5-FC), which is used in cancer therapy, into its active and lethal. 5-fluorouracil (5-FU).

[0273] MBQ plasmid was generated by combining a native promoter of FN-14, Thiamphenicol-resistance gene, FN origin of replication from a native FN plasmid and E. coli origin of replication (pMB1). The murine and human Il-15 expression vectors were electroporated into competent Fusobacterium 14 (FN-14). Thiamphenicol-resistant colonies were selected, and plasmid integrity and purity were validated by next generation sequencing (NGS).

[0274] In order to verify that the full protein is expressed, the recombinant FN-14 cells were grown over night in 4 ml Brain heart infusion-supplemented (BHIS) medium (supplemented with 30 μg/ml Thiamphenicol), at 37° C. under anaerobic conditions. Bacteria were lysed by resuspension with 5% SDS and 100 mM Tris, and incubated at 100° C. for 5 min. The lysate samples were digested by trypsin and analyzed by LC-MS/MS using the Thermo Scientific™ Q Exactive™ Mass Spectrometer. Samples were identified by Thermo Scientific™ Proteome Discoverer Software using human/murine Il-15 sequences and bacterial FN14 databases. The MS analysis showed that the expected IL15 protein and the cytosine deaminase was fully expressed in FN-14 cells.

[0275] Fusobacterium cells were then transformed with an FN plasmid containing mouse IL-15 gene conjugated to C-terminal HiBiT tag and antibiotic resistance gene. Resistance colonies were selected and the presence of the plasmid was verified by NGS. The plasmid containing-FN cells were lysed using BugBuster Protein Extraction Reagent (Novagen), and IL-15-HiBiT expression was validated by both Western blot analysis (FIG. 6A) and luminescent assay using the Nano-Glo® Luciferase Assay (Promega) (Table 2A). For Western blot analysis, FN cell lysate (both supernatant and pellet fractions) was run on 4-12% gradient gels under denaturing conditions. After transfer to 0.45 μm nitrocellulose, the blotted bands were immunodetected with a Nano-Glo® HiBiT Blotting System (Promega).

TABLE 2A

| Sample | Luminescence signal (RLU) |
|---|---|
| F. nucleatum and IL15 | 112,117 |
| F. nucleatum control | 37 |

[0276] Enolase and pyruvate kinase are two native FN-14 proteins that are expressed at relatively high levels (based on MS analysis results). The genes encoding enolase and pyruvate kinase, together with their native promoters (˜500 bp downstream to the gene sequence) were cloned into Fuso plasmid. To facilitate detection, a C-terminal HiBiT tag was fused to the two proteins. The indicated expression vectors were electroporated into competent Fusobacterium 14 (FN-14) and Thiamphenicol-resistant colonies were selected. The expression of HiBiT-tagged pyruvate kinase and enolase was validated by Western blot (FIG. 6B and Table 2B, herein below).

TABLE 2B

| | Dilution | | | | |
|---|---|---|---|---|---|
| | 1:2 | 1:20 | 1:200 | 1:2,000 | 1:20,000 |
| NC | 126 | 120 | 120 | 120 | 120 |
| Enolase | 2,001,868 | 161,051 | 14,406 | 1,574 | 229 |
| Pyruvate kinase | 1,047,408 | 58,672 | 6,916 | 765 | 193 |

### Example 7

### Phage can be Engineered to Deliver a Heterologous Gene for Expression in a Fusobacterium Target

[0277] The Integrase gene of FN-14-1 phage was tagged at the C-terminal with three repeats of Flag tag or HiBiT tag using homologous recombination; To facilitate recombination, the last 500 bp of FN14-1 Integrase gene were cloned into the MBQ plasmid (see Example 6) upstream to the sequence encoding either the three repeats of Flag-tag or the HibiT tag, followed by a stop codon, and 500 bp stretch homolog to the sequence downstream of the FN-14-1 Integrase gene (FIGS. 6C and 7A). The recombination cassettes were electroporated into competent FN-14 bacterial cells. Thiamphenicol-resistant colonies were selected, and the plasmid integrity and purity were validated by NGS.

[0278] Homologous recombination events between the native FN-14-1 phage Integrase gene and the indicated recombination cassette were induced by infection of the plasmid-transformed FN-14 cells with FN-14-1 phage; The bacteria were grown in 4 ml BHIS medium (supplemented with 30 μg/ml Thiamphenicol) at 37° C. until OD of 0.2 at 600 nm was reached. The bacteria were infected with FN14-1 phage (MOI: 0.01) and incubated over night at 37° C. under anaerobic conditions. Thereafter, the bacteria were centrifuged (10000 g for 2 minutes), and the phage were harvested using a 0.2 μm filter.

[0279] Next, the phage samples, composed of a mixture of WT and recombinant FN-14-1 phages were used for infection of wild type FN-14 bacteria. Following infection, the expression of the Flag or Hibit tagged Integrase in wild-type FN-14 bacteria was detected using a luminescence assay, as summarized in Table 3A.

TABLE 3A

| Phage sample | Luminescent signal (RLU) |
|---|---|
| WT FN14-1 | 880 (Background) |
| Recombinant FN-14 (#1 Enrichment) | 15544 |
| Recombinant FN-14 (#2 Enrichment) | 22373 |

[0280] The recombinant phage (expressing an HiBiT-tagged integrase) was detected by PCR (using a selective primer pair for the recombinant phage), as illustrated in FIGS. 8A-B.

[0281] Synthetic biology approaches were next used to engineer Fusobacterium nucleatum targeting phage genetically modified to express a tagged IL-15 gene.

[0282] The mouse IL-15 gene, conjugated to C terminal HiBiT tag, was added to Fusobacterium nucleatum targeting phage using homologous recombination technique. Briefly, the IL-15-HiBiT gene was cloned into a pre-prepared plasmid containing appropriate regions up and downstream of the recombination site within the phage genome. Thereafter the plasmid containing FN cells were infected with the phage to facilitate homologous recombination. The engineered phage was isolated and then used to infect WT FN cells. IL-15 expression was validated in FN bacterial lysate by both Western blot analysis (FIG. 8C) and luminescent assay (Table 3B).

TABLE 3B

| Sample | Luminescence signal (RLU) |
|---|---|
| IL15 engineered phage lysate | 3,140,905 |
| WT phage lysate | 48 |

[0283] The following experiment was performed to show that phages engineered to express a heterologous protein (e.g. enolase tagged with HibiT) can successfully colonize a tumor in an animal model.

[0284] Materials and Methods:

[0285] A mouse model of colorectal cancer was established by subcutaneous injection of CT-26 cells to flank. The expression of Enolase-HiBit in tumors treated with an engineered phage was detected by a luminescent assay. Briefly, the proteins were purified from the tumors using a gentle MACS instrument by shredding the tumor in PBS-tween supplemented with protease inhibitors cocktail. A luminescent signal was measured in lysates prepared from tumors infected with either WT or engineered phage. Luminescence was detected using the Nano-Glo® Luciferase Assay (Promega).

[0286] Results

[0287] The results are summarized in Table 3C herein below.

TABLE 3C

| | Termination (time past | | |
|---|---|---|---|
| Phage admin. | phage administration) | | Pg payload/mg tumor |
| Native phage (control) | 16 | hours | 0 |
| Enolase phage | 16 | hours | 400 |
| Enolase phage | | | 370 |
| Enolase phage | | | 80 |
| Enolase phage | 4 | days | 27,810 |

| | |
|---|---|
| Enolase phage | 33,800 |

[0288] The following experiment was performed to show that phages engineered to express a heterologous protein (mouse IL-15) can successfully colonize a tumor in an animal model.

[0289] Materials and Methods:

[0290] A mouse model of colorectal cancer was established by subcutaneous injection of CT-26 cells to flank. Tumors were successfully colonized by FN following IV-administration. 4 days post bacteria inoculum, IL-15 engineered phage was IV-administrated and following 16 h, 2 days or 4 days the study was terminated.

[0291] Tumors were extracted, cut in cold PBS into 1-2 mm band, dissociated and subjected to bacteria and phage quantification. Lysates were centrifuged, and the supernatant containing the phages were filtered. The pellet containing the bacteria was used for gDNA extraction.

[0292] Samples were digested with proteinase K and incubated until full capsid digestion. Then, the gDNA was extracted as described by manufacture (D3012 Quick-DNA 96 kit). qPCR assay for detecting and quantity fusobacterium in gDNA samples was performed by detection of the Nusg gene. Quantification was performed using an established standard curve.

[0293] Double-layer plaque assay was used to quantify bacteriophage isolates. A starter culture of 4 mL BHIS was inoculated with 50-100 colonies from a plate. This culture was incubated at 37° C. for 16 hours in an anaerobic environment. A volume of 300 μL of this culture was mixed with 5 mL of BHIS top agar (pre-molten 0.4% agar BHIS supplemented with 1 mM Ca²⁺, Mn²⁺ and Mg²⁺ ions), and the mixture was poured over a BHIS bottom agar plate (1.5% agar BHIS). The plates were allowed to gel at room temperature. Then, tumor lysate was serially diluted using phage buffer, 5 μL of each dilution was dropped over the bacterial lawn. Then the plates were incubated for 16 hours at 37° C. in anaerobic environment until plaques are identified. For IL-15 detection, ˜30 mg of the tumor was processed. To avoid phage derived payload DNA, host DNA was removed by DNAse. Then, RNA was extracted, and cDNA was synthesed. Detection of IL15 was carried out using specific primers for engineered IL15 using qPCR.

[0294] Results

[0295] The results are illustrated in FIGS. 8C-E. FIG. 8C shows bacteria colonization in tumors. FIG. 8B shows the level of IL-15 engineered phage in tumors. FIG. 8C illustrates the results of qPCR analysis, using specific primers designed for detection only IL-15 payload (and not endogenous IL-15), showed high expression of IL-15 RNA, 4 day post-IL-15 engineered phage administration. 4 day post-phage administration, two tumors were phage-positive and both showed high expression of IL-15 payload RNA; mice 11, 79.

### Example 8

### Host Range Infectivity Assays

[0296] Plaque assay: Solid media assays for quantifying and isolating phage are based on plaque assays (S. T. Abedon et al., Methods in Molecular Biology 2009 (Clifton, N.J.), 501, 161-74), measuring the efficiency of plating (EOP) (E. Kutter, Methods in Molecular Biology 2009 (Clifton, N.J.), 501, 141-9) and spot testing (P. Hyman et al., Advances in Applied Microbiology (1st ed., Vol. 70, pp. 217-48) 2010. Elsevier Inc.).

[0297] A starter culture of 4 mL BHIS was inoculated with 50-100 colonies from a plate. This culture was incubated at 37° C. for 16 hours in an anaerobic environment. A volume of 200 μL of this culture was added to 5 mL of BHIS top agar (pre-molten 0.4% agar BHIS supplemented with 1 mM Ca²⁺, Mn²⁺ and Mg²⁺ ions), and the mixture was poured over a BHIS bottom agar plate (1.5% agar BHIS). The plates were left to solidify at room temperature and then, 5 μL of each of the samples containing phage (Titer of 10⁶ per ml), or media only (as controls) was dropped on the plate, and incubated anaerobically at 37° C. for 16 hours or more until plaques are visible for counting.

[0298] Tables 4 and 5 summarize the host infectivity of exemplary bacteriophages.

TABLE 4

| Bacteria | | | Fn1-1 | Fn2-58 | Fn5-1 | FN7-1 |
|---|---|---|---|---|---|---|
| name | Bacteria | Subspecies | ml/10⁶ | ml/10⁶ | ml/10⁶ | ml/10⁶ |
| FN1 | F. nucleatum | vincentii | + | − | − | − |
| FN2 | F. nucleatum | vincentii | − | + | − | − |
| FN11 | F. nucleatum | vincentii | − | − | − | − |
| FN14 | F. nucleatum | vincentii | − | − | − | − |
| FN3 | F. nucleatum | nucleatum | − | + | − | − |
| FNN | F. nucleatum | nucleatum | − | + | − | − |
| FN8 | F. nucleatum | nucleatum | − | + | − | + |
| FN12 | F. nucleatum | nucleatum | − | + | − | − |
| FN15 | F. nucleatum | nucleatum | − | NT | − | − |
| FN16 | F. nucleatum | nucleatum | − | NT | − | − |
| FNC1 | F. nucleatum | nucleatum | − | NT | − | + |
| FN4 | F. nucleatum | polymorphum | − | − | − | − |
| FNP | F. nucleatum | polymorphum | − | − | − | − |
| FNC2 | F. nucleatum | polymorphum | − | NT | − | + |
| FNC3 | F. nucleatum | polymorphum | | NT | − | − |
| FNC4 | F. nucleatum | polymorphum | | NT | − | − |
| FN5 | F. nucleatum | animalis | − | − | + | − |
| FN6 | F. nucleatum | animalis | − | − | − | − |
| FN7 | F. nucleatum | animalis | − | + | − | + |
| FNA | F. nucleatum | animalis | − | + | − | − |
| FN9 | F. nucleatum | animalis | − | + | − | − |
| FN13 | F. nucleatum | animalis | − | − | − | − |
| FN17 | F. nucleatum | animalis | − | NT | − | − |
| FN18 | F. nucleatum | animalis | − | NT | − | − |

TABLE 5

| Bacteria | | | Fn14-1 | Fn14-2 | Fn14-3 | Fn14-4 | Fn14-6 |
|---|---|---|---|---|---|---|---|
| name | Bacteria | Subspecies | ml/10⁶ | ml/10⁶ | ml/10⁶ | ml/10⁶ | ml/10⁶ |
| FN1 | F. nucleatum | vincentii | − | − | − | − | NT |
| FN2 | F. nucleatum | vincentii | − | + | − | − | − |
| FN11 | F. nucleatum | vincentii | − | − | − | − | NT |
| FN14 | F. nucleatum | vincentii | + | + | + | + | + |
| FN3 | F. nucleatum | nucleatum | − | − | − | − | NT |
| FNN | F. nucleatum | nucleatum | − | − | − | − | NT |
| FN8 | F. nucleatum | nucleatum | − | − | − | − | − |
| FN12 | F. nucleatum | nucleatum | − | − | − | − | NT |
| FN15 | F. nucleatum | nucleatum | NT | NT | NT | NT | NT |
| FN16 | F. nucleatum | nucleatum | NT | NT | NT | NT | NT |
| FNC1 | F. nucleatum | nucleatum | NT | NT | NT | NT | NT |
| FN4 | F. nucleatum | polymorphum | − | − | − | − | NT |
| FNP | F. nucleatum | polymorphum | − | − | − | − | NT |
| FNC2 | F. nucleatum | polymorphum | NT | NT | NT | NT | NT |
| FNC3 | F. nucleatum | polymorphum | NT | NT | NT | NT | NT |
| FNC4 | F. nucleatum | polymorphum | NT | NT | NT | NT | NT |
| FN5 | F. nucleatum | animalis | − | − | − | − | − |
| FN6 | F. nucleatum | animalis | NT | NT | NT | NT | NT |
| FN7 | F. nucleatum | animalis | − | − | − | − | − |
| FNA | F. nucleatum | animalis | − | − | − | − | NT |
| FN9 | F. nucleatum | animalis | − | − | − | − | − |
| FN13 | F. nucleatum | animalis | − | − | − | − | − |
| FN17 | F. nucleatum | animalis | NT | NT | NT | NT | NT |
| FN18 | F. nucleatum | animalis | NT | NT | NT | NT | NT |

“NT” represents pairs not included in the experiment.

### Example 9

### Natural Phage Accumulate in Bacteria Colonized Tumors

[0299] Materials and Methods

[0300] A mouse model of colorectal cancer was established in which tumors were successfully colonized by Fusobacterium nucleatum following IV-administration. Phage (native phage) was administered to the mouse by IV administration 3 days post bacteria administration and following 4 days, the tumors were extracted and the amount of bacteriophage was quantified, as described for Example 7.

[0301] Results

[0302] As illustrated in FIG. 10, following IV administration, phage home to and accumulate only in the tumors colonized with the bacteria. The high specificity and safety of phage make it a promising agent to deliver anti-tumor payloads to the tumor microenvironment.

### Example 10

### Decrease in F. nucleatum Load Following Natural Phage Treatment

[0303] Materials and Methods

[0304] A mouse model of colorectal cancer was established by subcutaneous injection of CT-26 cells to flank. Tumors were successfully colonized by Fusobacterium nucleatum following IV administration. Three days post bacteria administration, phage (Natural FN14-3 phage) was administered to the mouse by IV administration and following four days, the tumors were extracted and the amount of bacteriophage was quantified, as described for Example 7.

### Results

[0305] Native phage, administrated IV, led to a significant reduction in Fusobacterium nucleatum load in the colonized tumors, as illustrated in FIG. 11.

### Example 11

### In Vivo Reduction in Tumor Volume in Mice Treated with Phage

[0306] Material and Methods

[0307] The mouse model was set up as described for Example 9 and 10. 13 days post cancerous cell implantation, FN bacteria was IV administrated followed by multiple IV administrations of native phage. Tumor volume was subsequently measured using a caliper and was calculated using the formula (length×width2)/2.

### Results

[0308] Tumor growth rate of mice following IV-administration of bacteria (day 13 post cancerous cell implantation) and IV multiple administrations of vehicle/phage treatment (days 16 &19). A significant reduction in tumor volume was observed 20 days post tumor cell implantation, as illustrated in FIG. 12. Reduction of tumoral burden by native phage or local expression of an anti-cancer/immune-stimulating payload to CRC by engineered phage may offer novel treatment approaches for patients with colorectal cancer.

[0309] Tumor growth inhibition (TGI) was calculated as 1−(mean tumor volume phage/mean tumor volume vehicle)*100. TGI was found to be 48%.

[0310] Although the invention has been described in conjunction with specific embodiments thereof, it is evident that many alternatives, modifications and variations will be apparent to those skilled in the art. Accordingly, it is intended to embrace all such alternatives, modifications and variations that fall within the spirit and broad scope of the appended claims.

[0311] It is the intent of the applicant(s) that all publications, patents and patent applications referred to in this specification are to be incorporated in their entirety by reference into the specification, as if each individual publication, patent or patent application was specifically and individually noted when referenced that it is to be incorporated herein by reference. In addition, citation or identification of any reference in this application shall not be construed as an admission that such reference is available as prior art to the present invention. To the extent that section headings are used, they should not be construed as necessarily limiting. In addition, any priority document(s) of this application is/are hereby incorporated herein by reference in its/their entirety

The application's sequence listing, which the Patent Office published only in electronic form, follows.

SEQUENCE LISTING (20 sequences)

SEQ ID NO: 1 - DNA, 36498 bp, Artificial sequence
  bacteriophage genomic nucleic acid sequence
tgaaattagtgatgaattaaaagaaatagttaaagaggtgtttaaaaatgataaaagaaaataataaaaatgaattaataaaaatagaaattagagataatcaacaattagtaagtggtagagaactgcataattttttagaaattaaaactccttatacccaatggtttgaaagaatgtgcgaatatggatttgttgaaaatactgattatatcctagtttcacaaaaaagtgaaagtagtaatataactggaattaaagtagtacaagaccattttataacattgaatatggcaaaagaaatatcaatgttacaaagaaatgaaaaaggaaaacaagcaagaatatattttatcaaatgtgaagaagcttggaacaatgatgatatgatattagcaagagctaatcaaattttacaaaataaagtcctatcttatactgaaagaattgaatttcttgaaaacaaagttgcagaagataagccaaaagtattatttgcagattcagttgaaacttcaaaaaatacaatcttaataggagaactagcaaagataataaaacaaaatggagttgacatagggcagaaaagattgttcacttggctaagagataatggtttcttaattaaaagagagggaacagactataatatgccaacacaaaaatcaatggagttagaattatttgaaataaaagaaacagcagtaacacattcagatggacatatttcaataagtaaaactccaaaggttacaggtaaagggcaagtatattttataaataagtttttaaaagataaaatagcataattaaattaagaggagaagttaaaatatctcctcttttttaataaataaaaatttaaaagaggaggtgtaattatgggagttttttcaacagatgatttaaaagaacttgaagaagaagtattaagacttgctagaaaatacccaaaagaagctaaaaaattcttacaaaaacaaggtaataaattaaaagctaaggctaaaaagaaagcaaaatctaaggtaaaagtaaaaaaaggtaactatttaaaaggttttaaaagagggaaagtttataaatataaaggtgaagaagatacagttagagtttataactcaatgcctcatgctcatttaatagagaatgggcatatcataaaagataaaactggtaaagaacatggttttaaaaaaggagagcatattttagaagattcacagagagagtttcaagatgaatttttaaaagctgcagataactttattgatgaagttattaaaaatggaggtttctaatgattaaactaagtcagatactaaaagcagttaacacaaaattgaaagaaacatttcctaaaatagaaattgatagtaaagatttatctgaaaaattcaatagacctagttttagaactgagttagatggtcttaaaacaagtgcttttatgactacttttaaggaaagaaactttacaatcagaatttatttttttactactttacctagtaaaggaagagaagaaagattaaaaatatctgatgaaattgaaaatgctttcttaggcacattgtggataaatgaaacttttgctattcctattgatgagatagagtttgaagaaactgaagatggagtattaatagcaagttttgatagtttgagtatggaagagatagaaaatgatatagatggcgaaatgatggaagaattagagtatcgttttgataagaaataggaggttaatatatgggattacctaaaatagagattatttttaaacaattagcagttacagctgttaaaagaagtcaattaggtatagttggattaatagtaaaagaatctactaaacaatgggatagaaaggtatacaaagatattactgatataaaaagtgatgattattctgctgaagtattaccattgattaaagatagctttgaatacactccaaataaagtggttgtattcaatgttaaagatggaacattatctgacacattaaaaaaagttgcacaagaaagaattaactggctagggttagcttatgatgggaaagatggagatactgcaactcttgtttcttggataaagtcagtaagaaaagcaggcaaaacttataaagctgttgtatttaaggctactaaaccagataacaaaggcatagtaaacttaatgaatgacaaggttacatttgtagataatagaggagaagttgaaggttggcaatatgtaccaacaattctaggaatgttagcagggttaccaatgactagatcagctactagctttctatgtgggaatttaaaggaagtttctatatttgatgaaatagatgatgttattgataaaggtggtttctgtttgtataaagatgaaggagatataagagttgcaagagcatgtacatctttagaagaaattacacaagatgaaactgaagatatgaaagacattatcataattgaatctatggacttaatgagagatgatatttactcaacattcaaaaaatggataggtaagtataaaaacaaatatgataatcaagttttattctttactgcaattaatgcttatttcaaagaattagagaaagaggatattttggataaagaatatgataactattcagaagttgatgttgaagcacaaagattagcatggcttggagtaggtaaaaaagaagtggaagaatgggatgatgaaaaagttaaaaagactgcatttaagaaaaaagtatttatgaaagctaaaattaagatattaaatgctgttgaagactttaaatttacaattaatatgttctaaaaggaggacaggtagatggctaataaaatggataaaaataaaattttaagaggttcatttggtgctgtatggctagatggagaagaattaggttctgttaaatcttttgaagctaaggttacattagaatatgaagatgtggatattatgggagaactaggaaagtcaaaaagatatatgggctttactggtgaaggaactatgacacttcataaaatagattctactattggaaagttattagctgatgggataagaaatggtaatatgcctgattttaaaatagttgcaaaactagatgacccaacagcttatggagcagaaagagttgaattaacaggtgttacaattagtgaattaatggcattaaaatttgaaaataaagctttaagagaggaagaagttccttttagtttttcacattttagatatatagatatgatataaggaggatatgaaaatggctaaaaatataacattagaaatattaattgcaaagaaacaacaatcagaaaatgataaaatgaaagtggtgttatttaattcagaagtattaggtggaacaatagaagttgtaaaacataaagcaagagatgtaataaaaattatggatagtacagaagaaaaaacaacagaagcagcttacaaagctaactgtaaattaatttataaacactgtccaattttacaaaaaaaggaattacaagaagcatatcaagttgcagaaccatatgaaattgtaatacctgtatttgatgaaaatctaggagaagtaaataagttatctaattttattctaaacctttatggattaggtgaagaagatgacaaagctagtaaagtcttagaagaagagattgaagatataaaaaactaatattagaggatgccgatttggcattcctctctttttatactttaaaaggcttttcaatgaaatatctgttgaacttatcttatgaagaaaaattatttatgatggctacaatggatcttgaaattgagagaatgagtaaaagtttttcttgacttaaaagtatagaagtgatattataatgttaagaaaaaccttattagttaaggataattaaatcgggaatgacggtaagaatatcattcactcgtatgaagactggtttattccagtcttttactttttatggagggaaaatggtaaaaatagaaattgtttctattaagaaaaaattttttcaaatttgtgatgatagtgaattattacataatgatgatttaaaaagaccttatcttataattttaaagttaaaatataaggataaaaatatagactttgctattccttttaggtctaatattcctccaagtgctaaagagtgggaattttattctttacctccaaatagtacaacaaaagaaacttatcatcatggattacattttataaaaatgtttccaataaaaaaagaatataaggaaaagtttcatacttcaaaaaatgagttctttcagaaagttattgaagctaaaataaaaaaagatttaaaattaatagttgaaaaagcacaaaattatttaataaaatatgaagaaaaaattattaatgaacattcagtaaatattgataaaataatagaaattttagacttataaagagaggttttagcctctcttttattttattaaaattcctcagataaagatttaaatgttttagatgttcactataatgttagaaaagtttatcttaaaaatgatatagagcaaaaatcattattttaaagaacctatttaatggttctttttcttttttaaaaatttctcttgacttttgtacgtaaatatattattatatttgtacaggcaaaagttaggaggtgcaaaatgaatgccagaatgggtagacctacaaataatccaagaaataaaagattagagattagacttaatgaagaagaagataaaaaattgaaagaatgttcagaaaaattaagtttgacaaaaactgatgttttgatgaaagggttagatgaagtttacaaacaaattaaaaaataaagtattgctacaccgtccaaagttcacaatactttatttacctaagaagttaccctcttatgaaatctattatatcataagggagtacttctatcaattataattttgaaaggagtattttttaattatggacaaatttgagttagaaaagttaagtttaaaaatggaagccttagatgatttattactggctatggaagaagctatatttaatgagaattatagtgttcaaaattttagaagtggttttgcatatctaacagatatggctaatgaaattagtgatgaattaaaagaaatagttaaagaggtgtttaaaaatgataaaagaaaataataaaaatgaaatagtaacaataaaaaatgtaaggggatatatagatgaaaaaggtactgcttggttaaaccttgaagatgtagcaaagggattaggaattgtaaaaaaagataaaaaaaacggaaaagaatatatcagaatacattctcaaaatataaaaagatggttaatagatttcggacttataaagtccgaagatgatttacctgaatatattcaagaaaatgtattttataaactttgtatgaaagctgataatgaagttgctagaaagtttcaagataatgtatgtgatgaaatattacctagcattagaaaatatggaatgtatgccacagatgaattattagacaatccagatttaataataaaaatggcaactagattaaaagaagaaaaagctaaaaataaagagcttgaagataagatgaaagaagataaaccaaaagtattatttgcagatgcagtagcaacttctcaatcatcaatattagttggagatttagcaaagatattaaaacaaaatgggatagaaacagggcaaaaaaggttattttcaaaattaagagatgagggctatttgataaaacaaaatgggatgtcatacaatatgccaactcaaaaatcaatggagttagaattatttgaaataaaagaaacagcagtaacacattcagatggacatatttcaataaataagacagtaaaggttactggaaaagggcaacaatattttattaatttattcttaaatgaaaaaattgcataattaaattaagaggagaagttaaaatatctcctcttttttattgcaagaaaggaggtttaaatggcaaagactattggtgtattacttagtttaaaagaccagtttacaacaccattacagaaagcaactaagagtgttaagaatatggatagacaacttgaaaaagctggaaaccaagtaaaagcatttggtagaaaaataaaaaatggaatgaagacagttgctaaatgggcagcagttggatttggtgcattgactgctggtgcagttttatttgctaaacaatccattgatgcagctaaggatcaagtaagaattgagaaattacttgaaactactatgaaaaggacaagcaatgcaagtaaagagcaaatacaagcaataaaagatgaagctagtgcattacaaaatgtaggtgtagttggtgatgaggttgcacttgctggagcaaatcaattagccgtttatggtttgagaagtaaccaaatcaaaaaattaatgcctgtacttaatgatatgatagccaaagaaaaaggtgtaaatggaactcaagaagatgccatagcaatggcagaggttataggtaaggctatgaatggacaagtcaaaggtttacaaaactttggagtatctttaacagatgcagaaaaaaaactatttaagactatgaaacaagagcaaagaatggagtttatagttggaaaacttaataataaaataggaggtacaaataaagcacttcgtgaaactgatgaggggaaaatagctaatgttacaatggcttggggagatatgaaagaggaattaggaaaaaaattattgcctattatgggcaatgttgctgattggttttcaactaagataccagctattcaaaattttattttaggaattgctgataaaattcaagaattagttacaagagcagaaccttatataacacaaattaaggatatgtttggaaaaatatttgaaaaagttaaaccagcattagaagaaacttggaaaatattgaaaaaagctgggaaaatagccatagatatagcacaaggaattatagataattgggatataatcggtcctctcttccaaggtgttgcaatagcttttggtgtattggctggagcagttacagtagctacgacagcaactgcaatatttaatgctgttatgtctgtaaatcctgtaatgctagtagttatgggaataggtttactaataggaggtattattttactttataaaaaatgggatgtactaaaaaataaaataaaagaattatgggctaaattagataatcatccattgggtaaagttttaaagtttattataaagtttggaaaccctgttggtgctatgattaatgcattcttatttttaaaagatgtaattactcaaaattgggaaactataaaagattttgctatgactttatgggataacttagttggtgcatttaattatgtaaaagatgttatattaggtgtttgtgatgtggttggtgggatatttactgctatatgggatggagttgtaaaggcattagataagttgaaagagggctttaataaagtaacagattttattactggtgcttttatgagtgcttgggagagtttgatgaaagcattagatgctatattacacccaattgaaacagcaaaaaaagcatttggtggacttatagataagttgaaattttggaataatacaaaagctgaagataaaacaattaatatcaatgaggttaagagaacagataatattggtggaagtaataaaactggtataactacaagcacagttaaaaatcctagacatgcattaggtactgcatactttaaaggtggagtaacaggaattaatgagggtggaagagatgaaactgctatattacctgctggaactaaaataatgaaccatgaagaaagtaaaacactagaaaaaaagagtagcaacaagggtattacagtaaatataaatgtttctggaaactttatcggtgaaaaagaacatatggaaaaatatggagagtatacagcaaataagattttagcagctttaaataatatgtaggagataagaaaatgaatataatttttatagttgaagataatggagtacaacaagaaatggtaaatattccagtagttcaaaatatagagccagtaaactgtgaaacagaagatgaagaatttacaactattaatgggaaaaaattaaatttaattggtggtaaaggacttagaaacttttcattttcttctttttttcctagtaaattatatagttttgtaagttttttaaattataaaaaacctaaatattatattgatttttttgaaaagtatagagatgcaagagtacctttaagaattattatagttgataagtacagagtagtcttaaatatgctatgtagatataattttacttattcttttagagataaggctggagatgttccatatactttggatataaaagaatatattttacctggtgaggctgataataatgtataagacaatagtaaaagaaatagatgtaaccaattatataagagatttaacctggagagatagtattgacacattaggagttgaggtaagttttgaacttgcagtaaacaagtttgataaaaatttatcttttctctatgatattactttgggtgatccagttcaaataatcaatgaaaaaggagaaacattagtacaagctattatagtatcagaaagtcctaatggaaagactacatcatttactgcttatgatatggcttggtatttgaataaatcaactgtgataaaacaatttaaaaagatggtagggaatgactgtattaagtccttatgcagtgaaattggaataaaagttgaagtaagtggattagatactaagatagataaaatttataaggataagactatctcaggcgttatttatgacatcatagaacaatgttcacaattcaattctaaaaaattttttattgagtatgataaaggtactctaaaagtaggaccattcaaaaagataaaagttactggacagtatgaaatgcacaaaaatacttttatagatgtagccaaaaacattggagaagtttcattaagtaggtcaatagttgatatgaaaaattcaattctggttgttacacaaaataaaaaagcagttagaacagtaggaaaagagcaagacagtgaaagcattaaaaagtatggtatgctgcaagaagtagtaacattagatgaaaaagaacataaaaaagctaaacttgttgcaaaaaatgagttaaaaaaattaaataaaattacagaagacttttctattgatgtcttaggtgatgataaggttaagagtggtagagtcattgatatagacataccactttttaatttaaaaggtgagtatctaataaaagaaagttctcacagtgtacagaatggaatccacagaataaatttaaaattggaggtgtttaatgagtgagtgaaaacaaaaaatcttgggatatagcagtagcagagaagttcaaggaaagagaaaatccaagtccaataggtgctgtattaggtaagattttaaagcctctccctgacatctctattgagcttttaaatggttatggtgttattgatagtgataaaatttatttatccaatgcaataactaatagattagctattgaatgcactatgaaagaatttgaaagtcaaggtaataaatcaactacttgcaaaattaatgatttaaacacagatggagcaggtagtgatagtaacggagatactaatttaagtttatcaggacatagtggtacttatgctgatagttcaagcgaaaaagataacaaagataaaggtaaatttatattacagactgtattccatttaaaaaaagatatgtttgtattagttatacctaattttgaagaggacaaattttttattgtagatgtatttaattatgcaccagaggtgagtttagaatgggaatattaccaaaaatagattttgttgattactctaaacaagacataactaatggtaaaaacagcaatggtaaaacattcttaatagactttcagaaaaagaaattattaaaaagtaatggacaattaataaaaacagatgatgaaagagctgttagaatgtggattgaaaaggttcttttaaccgaaaaatataaatggaatatttataaatataatggacctaatcaatatgggatgaaatataaggctatgttacttagtcaaagatttcctacacctgttttatatagtgagtttgagagagaattaacagaaacaattaagaaaaataaacagataatagaaattagaaatattgatataaagttagaaaaacataccttgaaaacaaaatttgaagtggtgttaaaagacttcaaaacatttgaatgggaggggtatctatgataataaaaaaagaatggaaagaaattttaaaaaatatgcttgctaatgtcaatgatgaatatgataagacagaaggaggcttattttatgataacttagcacctgtaagtatagaaatagaagagataagaaaaaccttagaatatatatttttaaattcttttgcagaaacagcagaaggtgagtatttagataatatatgtaaagaggtaggagtatttagaagaaaagcaactaagtcaaaaggtactgtaattataaaaggagtacctaacactgttattgaagtagggacaaaagttgcaagtgatacttatatttatttaactacacaagaaaaaataatatctgctgctggaagtgctgaagtacctattgaaagtgaaaagtacgggaaaatatataatatcccaaaaggaactattacaaattttcctgtaactattccaggattaaatgaagtcaataatctagcagaaactgttgatggttatgatggagaaacagatgatgaattaagagaaagatattatttcaaagttagagaaccagtaacatctggcaatatttatcattacaaaaaatgggcttttgaagttgaaggagtaggaggagttaaagttttcccattatggaatggaaatggtactgtaaaggtagttgtagtaaatagtgatattcatgaagctgatgaaactttactaaaaagagtaagagattatttagaagaagttagaccaataggggctactgttacagtaaaaagtgcgataggtaaagctatatcaatttcaggtactgttaaaatttctaaaaatataaaatttgatgaagtaaaaacagagtttgaaacaaaagtaaaagaacattttagaaaagtaggatttaaacaggattatgtgagttatgcacaattaggaaatatcttattaaatattcctggtgtaaatgactatgatgatttaaagataaataatgcaactttaaatgtacagttagcagctgaggagattccaaaattaacaacaatcactttacaaaaagaggtgatatagttggaagctaaaagactaatgaggcatatgccaaagtattatagaggtattttagaaataactttattgcaaaaagtaatagaaaaagaattagatacagttgatttaatctcaaaagatgtattaaatcaattttttatttacactgctacttggtccttaccaatttgggaaagaatatttggtttaagtgttggagataaaacaagcaatattgaagaaagaagagagaatttaatttctaagttaagaagttatggaactactacaaaagagatgatagcaagagttgccaaaacttttacaaatggagaaattgaagttgtagaagataatccaaactatgcttttaaaatactatttacctctattgttggaatacctaaaaatattgaaaactttaaggcagtaatagaagttataaaacctgcacatttgaattttagtattgaatttagatataacacacataaccaggtagcttatttattacataatggattaaagttaaaaactcataaacaaatttatgacactagattatatgaagatagtgcagtagtaggtaagtatcataaacagaatgaagtaggaaattttaaaaataatgagttaaaaacaaaaactcatcaagctatttatgatgaaaggagatagaaatggctaaatatacagaacatttaagattagtaaaacctgaggggaatgagtattacaatgtggagcagttcaatcagaatgcagaattgattgataaagaaacaaaaaaattaagtgagggattagcaaaagtacaagaaggagcaacaagagagaaagctggaatagtgcagtttggaacagaagaaggcaaggcactagaaggaatgatgttagctagacttgctggatgtgttgggtatggtggagatatacaagaaccaggagtaaaagatgtaaactatatttactatgacagaaatacaagaaaaatgtacaagtgtttaaatcaaaattcagatgtgtctgcaaatgttgctaattttattccattggacaataactcacttttggatagattggaaaatttctacacatatagagagtttaataattatgctcaaataaaagatgtaacaagtattacagctagggtatatacagttggaaatttggcaattacaagtataatagttgaaactcctaaattgattggaaaaacaacaataaaatttccaattaagtataaagcattgccatttgtaactttccaagataatgatactgcctcaactccacctggacctcttggaatcaattggactaatttggattcaattgaagtacaaggttttaatggtggtttcacaatgttagtagttggagcaatttaacttagctatttatagataaaatagaagcaataaagttattatctgctgtagaatttatccctattatttctataaatttagagttactaggaattgtcccaagtgtctgtccttttgttgcagctctacccttaaaaatttcagaatatttaaatagattttccaatctatacacattttaaaatctgcttgtagatggagcaagctacctaaattatttttttttgaaaggagaaaaaatgaaaacaataaatttctataaaaaagacaaattaatcttttctgtgtatgcagaaagtttagaagatgttttaaaatcacctctatcatattttccagcatatacgacagatgtgataatcactgatatatcttatcaataccccatctataaagatgacatactaagagaaatgacaagagaagaaaaggtaagagctggaatagatgttacattggaagatggagaaatcataaaagataagaaaattataacagtgccaaaaccacaaggaaatccaaagtatttaagttggaataaggaaaaaggtttgtggctattggataatgaaagagaatatcaagactatatggcacttatagacgatttaaaggctaaatcattggcttatggttttgattataaagttggaaatgaggttcataggcaaaagtgtagagataaagatataactctattggcttcaaatgtaacttttatgttggcagaaaaaactatttatggaaaagaaaaaccgataacttggtattttgaagataatttcggtttagaattagatttacaaaaatcattagtgttagctggttttggaaaaacttttactcaatcagtttatgatacagaaaactattttaaaacagaggtaacaccaaaagaagttacaaaagaagaatttgaagctaagagaaaagaaatacataataaattggtcaaaatgtaatttaaagagtttaaattaattagaggtagttttatatagctttctctaactaatggctaaaaacaacaaattacaaagtctaattaataatttttaagaaaggagagcaacaaaattgaaagtagcattaattatcggacataacaaaagaagcaaaggagcatattcacaaatagtcggctctgaatatgactactggaaaggaatagcagaaaaaataaaaactgaaataccagaattggtagatgtatatgagagaaagctaaataaattttatgttctagaaatggaagaagttttaaaagaattaaacaagaatgattataaaacttgtttagaacttcattttaattcatctactaacagtcaagccaatggttgcgagtgtttagtttattataaaaatgatagtgctaagaaattagcaactaattttatggcaaggttgcagaatgtttttggtagcaagattagaggtaatcacggaataatagaaattcaagatagcaaaacaagaggaggctatggaatatgtaatagcaaagatacttatatcttggttgagcctttttttggcagcaatccagatgaaagtttaaagttttctgtggaaaaagatgttgttaatttatttattaattttataaaagaaaatatttaggaggtaaaaatgaaagatttaattaacaaagcaataggatatttggcaggttttaatgtagaacaatggatatggatagcagtagcaggattgattttagtttatcttatttacaacagaaaacaatatgtaaatgtatttaaacaatcagttatttttgctgaagaaagttttaatcacggagaaaatagaaagaagttagaagcagcagtaaattttatattatttagaacttctagtttaccttggatagcaagaattataattataaaatttattagcagaaaaagaatgattgatattatagaaaagacattacaaaagttttctgatatctttgctaatggatataaagtagatataaaaggaaatgaggaagatggagaaaactaaattaatcctagatccaatttcaaatggtaaggcaattttgctagaagagtatgtttatgatgtaaatgggtacttgataagagtacccaaatcttttataacggatggggcatcagtacctcattctttacaatggttgtataatccttatggtaaatatattaatgcagcagttatccacgattatttatattctacatataacaatactggtataaacagaactcttgcagataaaatatttaatttcattatgaaagaaacaggagttgataacaggaccagaagaaaattttatactgctgttagatgctttggagagccatcatggcagtctaagctagaaaatgagggatataaaggtagagctatcatagatagaactaaggaggcaaaagagtattataaccattggtataaagtattagggattaggtgatattatggaaaaaactttactagaatacggtgtagtaggggctattttactgtatttcctatggaaagatagtaagacatttgaaatttataggaccactatgcagaagatagtagaccagttggaagcaatgcaaaaggaccaaacagaattaaaaaaagatatggaggagattaaaaaaatcataaagtaatggggtaggattttgtcctaccccttcttttttagtgtaaaaattttttaaaaaagtgttatctaacatatgttatatttgaattaatctaaattagattgaatttggtgcaaacaaagtgcaaacaaaaaaagtatcagaatacaaaaaagccctcaacttttttcaagttcgggcttttttgtagaaattaaactataatttatatttatatttttaacacttgaatataccataacttcaaaatttaagtgtagaataaattgacttagcttgaattagatgtcaacaaagtgcaaacactttaatgataactatatattctatatactgttattttatatctcatctactgcctctttcaattttttgatattcttatgtacataaacttctgatgtagttttatagctagaatgtcctatcatttttataactgcatctttatctgcaacattatctgataaaagtgtagcaaaagtatgtctagtatcatgtaaactatgatatgataaacccatatctctaaacaatattctaaaatggttatcaaaagaatcataatcatactctaaaccatcatatctttgccataaaaatgtatccttactaaaatatctattcttgaataaattcaatattttgtctgcaatagggacttttctaactccagctttactcttagatttttcaacttcaaaataaaaatcttttaaataaatattttttctatttacttttaatagttctcctattcttaatcctgtataacataagattaaaattatatctattattttgtacttatctatttcataattatatagattattccaaagtgcttgtaactcttctttactgaatggtctttctctatctccagttttgttacctttttcctgaactggtaattttaaaaacttagcataattcttagttgccatatcatttagaatagcaaagtcccagatattagaccagaaacttcttaataatcttaatgtgctattagttagatccaaactataaaaaatattttgtaacataataccattgattttagctatttctaatccacataactttttacttcttttaaaattaatttcatagttattttttgttccatcttttacatcttcttttgattttatccatagttgataaatttcttcaaaggttatacctttttcttttttcttagtaatttttacatcagtattttctaacatttcaaggttatttgtaaataaagctagtttataagtctcagcttctttttgagttttaaaacaagctataaaatctctcttatatctcttttcttctatactgtaatatttaggacctaataaagcccaaggctttcttctgtttccagatagtttaaaaacagtacccattccatttgcagctctcataaaaaaaatcacactcctttatttgcataataaaaatgagtgtgatataattttaatatctgaattacaaagagtatcacactcttaaagctccatagaatattggtagtattttatggggcacttttattttaaaaattaatactaaaaccaactgattttaattcttttactaaatccattttccagtttgtatacttaatatatacaataccagaaatgtcacttggaatttcaatatcatcttttaaaattgctgaaacattttctcttccaagttttgcaacaaaatatccatgttcaaaaataacattttgacgtgcacgaggttttaactcattattgtcatttttacaacctttatcacatggagtatataatataatagcataattagctttttctgaataacattcaattttttcaataattgtattacctttattttcttgttcatgtaaaattatactttttaaaccaatttgttcaacaaatcgagctacttcatttttaaaattatcatcttgtccatgaactataaatacagtgttaaaaattttattagaaaaattattagattgctctaaagatttacctatttcatatttattaaaagacttagaatattttttaagaacttcttttgtaatatcttgtgtaatgttttcgtccataaatgcatatctaaaaaaatcatgatttctaaaatcagcaatccttgacgctctatctcttgcatattttatttcttttaatttttctgcttcactttttattgaaaggttagatttttttattaaaaagcgatttatatcactttttttaaaagaataaccttcaataaaaaaatctgtatcatttatataaggaaggatataatcttcttctaaatcattttctgaaaaatcaaattttaatatataattattacttttattaattacaattttattaaattcaattagtatgtgataatacattaaaagtcactctctttcttttagattttaattattaactctaataatttatagttaatgttattgaatagtcttctctattattttctaactttttgccattccataatttatattctccacctgataaatttgctataactcgttttattcctttattttctaatattttaccaaatgaaacattcatatttttaggaacatatccaacagtacccattccttttattaatattctaatagcatttttatcatattcattatctggctctttttcaaattttattaatccattaggatattcagatactatttcataatcttgtggaatttcataaatttctatatcagtatatttattagtttttatttctgagttagttaaaccttcataggttacaatttctttgttttctatttttttaaaaaagaatttactgatattagattgtctacctcctaaaaaagttcctgctacttggaactttaaagttctatatttttcattatctttattttctatttttatattttgtggagaaatatctaaacttttagtattaaatacagaaaaaaagaaaaagaaaataaaagtaataaccagcataataattccaaaaataatagaatcagtaaaagctacaatagttaatattccaaaaataatagtcacaattaaaaataaataccttaatattttttttaacatgttcccctcctaaaattttctataaacctagtaattcttttttctttttatcaaattcttcttgtgttatgataccttgatccaataaatttttaaattttaatatttcatctgctgcactaatctggtttattgtaggtgcaggaccactagcattatttttagcttgattaatatatctttcaatttcatcaagataaccagaaggcatagaataaattacttttcctgaattatcccaaatttctaactctcctgttagcatacctttctttttagaaatgctattaattttatcaatactcatagaaacagaactaacaccagataaaaaagcaatttttaaaaaactaactctcttagaagttaataagaaagtaccatctgtttttccttctttagcttgacaaaaaaataaaagttcttcatcttctttaagttcagaaattatagaagtaaaatattttttactttgtaaaggtggaagtattatccctttactttttgcaaaactttttaattcatcaacagtcataaaccccatctcctttaaaaatatttttatattttatttggtaaatacaaccaaatatcttccccaaataaactcatatattcaaattcattataaatattatcaatttttttattgattgaatttttaaataatgcaattaaattatcattttcttcaactatgtaatatttccaatgagtactgaaatgattagaacaatattcagaaacttctttactcatattaaaaaaatatctaaataaatcaggtaattttaaatcattgttattaatttcaacatacatatataaagccaaaggtaaaggtgagctacaatgccttgcaaaacaattagcctctttttcctttatttcgttatacctttcaccatcacaaaatatataactatattcttctttcaaatgttctaaaaagtaatgtcctaattcgtgaaaaatagtccatctaattatatatactgaatcttcttcattataacaaagtatatatttctttttccttttcttttttaagaaacctctatcactttcaaattggcatttgatttcttctattgacatattaggttgctttttttgaagttccttagcaaattctgtataagtttttaattctatgttatttatcttttttataatcctaaaaggatctattggtaaaaccccatcactatattttaataagacttcataagcctttttttgtgcataattatattgaatatgagaatttgttctaatcaatttaatcaccttgatttaattaatcttcttcatcttcaacattttcatcaaagtaactatctattaaagcctcaactatttttcttttggcttcatcaagtttactatatttatcaaaaacttttttatctcttgcagcagttttaacttgattttgagaattttttttatctcctaaaagttcatcagcttttagatccaaaacattacaaataatttgaaatttatccaaagggatattagtttccattgtttcatatctttgtaatgtagaaggacttatacctgtttttacagataagtctcttaatgaaagtcctaaactatctcttttgttttttaaaattctaacaatttctttaatttcataaggcatttactccacctcttttgttttttatataagttgattatacaattattttttcatatttgcaacaaaattttaaaaaaaataaaaaaaagtttcaaaaatgggttgacaaaaacaaaattctattttatacttgtttcatataagggacaaaaaaaggaggcgagatattgaatactttaaaactaaaagggaaaatagctgaaaaaggtaaaacacaaattgaactagctaaaatattaaatatttctactcaatcatttaatgcaaaattaaatggaagagcagtatttgatattgaagaagcaaagaagttaatagctgaacttcaaatagaaaatataaaagaaattttttttgattaattagtcccatatttgaaacaaaaatgagctaaaactacttaggcgataggatattaagaaagataagttaattaaaaattaataaagactatcaaatccctaagctttgatagtccttacctaaattttttaactttttacattttgcaaagttaaattaattttacctttactagcacagaaaactggttttcaaatctaaaattaatttttcttagaatttcttagggcaattctttctatggaatgtcctatcacttaagcagttttagttctgctaatttaaagccaatagctgatagggaaaaagaatgacagtgtccatttatacccgacttgtacggttgttattcaatttcaaaaagaactggcataatcaaaagggctttcaagaaagaccacctccaattttgccacaaaaggcttggttttattttaacacaaaacaataaaagttgctattaaaaaaagaaagagagagtgatgtatgaaaataaaaatattaaaaaaagaaaatgaagtttcaaaagtagaaattgatggtagagaataccaaaacatttcaaaagtagaaataaaaaatgattacacatcaaacggaataaatgaaagtgtaatcattgagtttaaagatatatcacttttggaaatatccactgacaagtgaggaggcttatgaaacaaaaatcaagaaaatataaaagatatataagaaagcaaataaaaaaacagcttcaaactactgcgaatagtttagagcaaaaaataacagaaacaataggtactaatcttctaaaagctcttgatgatatttcttaagcataagtttcacagttttagtagaaatttctgcaattttaaaacctatttctttaaaaacatcttcagttttaaaatttttagttaattcatcaagagtttctttggcaattttatcaaaatcaatatcttttttcacaataatcacctccttagagatgattatagcacaaaataaggaggtggaggatatagagaaaagatataaaaatagggacaaaaatagaacttgggagattataggaggaaaaaatgaactgtaaagtatttcaaaaatgggtaaatgttatagtttttcctgaagatataaagttaatagatgctattgaagttatccaaaagtacatagaaatggaggctataaatggaaataaaagaaaataaaaaatttgcgaaagtaaatatgagagatgtaattaaacataaaattaaatgggtatttaagattttatggctatgtcttaactatccatttgataaattattagaatggatgtgatatttatgacaataaaagaaagaattgaaattaaattaaatttagcacaagaaaaattgaaagaagctaatgatgaatattataagttgggaaaagaaaatagaccagttgctgaaggacatgcttatgcaatggttagatattatcaaggtgtagttgatacttgcaaattcacattagaacttttagaaaaaggtgattaaatgggagattataaaatcagtgtagaagaggctgttgctttatcaaatggagaattaaataaagatgatgtttatagcttaattcaagctaatgaagttccaggttgtatttatgtgaaaaagaatgaagaaaaagaaagaggaaaatatttaatattaaaacctcactggttaaactttttatctggaaaaagctataaaaaagaaaaaacatctgctactaccgaccaaagtattacagatgtttaagttaaaagattcaagtattcaacttttttgatacttgaattatacattaaattttaaataaattcaaggaggaaataaatggaaattgaaaaaagaaacttattattaaattttattgaattatcaggaagagaaggtttagttgaaaataaagtaattagtcaaaaagaaaaactatttaaaatattaggagaagttgaaaaagttctattatcaactaataatagtaaattaaatattgaattagaaggtgctgttactgatgttatagaactaacacaacatcaatattttgaatatggaagaatagcaaatgttattgaagaggattatcaagaaaattatgatccttttaaaagaattgatgaaacagtaaaggagtagataaggatgaatgaattaataaaaatagaagttagaaatggacaacaattagctagtgggagggaacttcacaagtttttagaagtaggaacagaatatatgaaatggtttagtagaattatagagaaatataattttattgaaaataaagattttaccgtaatcgtcaaaaatgacgaagacgatacagcttttggtggaataagaaaaagcacagaccacttaatgacattgaatatggctaaggaaattgcaatggtatctaacacagaaaaaggaaaagaagcaagaatatattttatcaagtgtgaagaggcttggaatagtccagaaatgatattagcaagggctaatcaaattcaatcacatatgatagaggattatacaaaaaagattgaattgcttgaaaataaggtaaaagaagataaaccaaaagtattatttgctgattcagttgcaacttctaaaacttcaatcttagttggagatttagcaaaaataataaaacaaaatggagttgatataggtcagaaaagattatttacttggttaagagataatggatttttaataaaaagattaggaactgactataatatgccaactcaaaaatcaatggagttagaattatttgaaataaaagaaacagcagtaacacatgcagatggacacacaactataaataaaactccaaaagttactggtaaagggcaaatatattttattaataaatttaaggaagcttagttttaagcttcctcataacctatatatttatatttttttagtaaaggatgcatagaatattttgaaatattttatattttagttttatattgatattaaatgatattttaatactaaaaatattttaaaatatttcaatgtaaaataatattctaaaaaaattctaataatttttctatgtatatcaataaaaaacaaagaaaaattttacatattctaaaagaattaatgcattattttacattaatatttcctactaaatttcctaattaaaaaatatttatgataaaagaaatattaatatttttcctactacttccaactaatttattttttgaattaacagttactatcttgtagtcttagctgataactctaatgatagtaattgctaattgaaacaataaaggtacaggaggtaaaagatgaggttttcaacaacattaaataatcaaaaatgtatggaatgggaaatcaatgcaacacaaggaatattagtagcattattatacgaagctaatgcttgggctaatgaagaaataattgataataaaacttattattttgtatcaagaaacttaatcttaaaagaactaccaatgttttttgaaaaagctgatactgtgtatagaaatttaaaggtactagcagaaaaaggaattattgaatatataaaacataagggaatggacttaataagattaacagaaaaaggtaaaagttggaattttatagaaaataactcggaaaaaaatccgaattttgatagtaattcggaaaaatctccgagcaaattcggaaaaaaatccgaaaataactcggaaaaaaatccgacaaataaagatactaatatacaaaaagatataaataaaaataataaagaaaaatataaaaaagaaaaaaagcaaaatgagatccaggagtttataaataatcttgatagagatgatgaatataaagaactcttatttaagtatgttaaatatcgtaaggatattaaaaaaccacttaaaaccatagttcctatgaaaaagattttaaaagattttccagactggtttagcttagatgaagctattaacattgcaatggaaaaggaatggcaaggcttagagcctgaatggatagctaaatataaacaatctaaggctaataataactatggaaaacaagcagaagcaaaagatacaagtcaactaaaagttgatgatgattttattgaacaaatgaaagagaggtatggattaaatgactaatcaagaatttaatgcagcttttaaaccatttttagattattttccaactactgaaatgacaaaggaaaaaatcaatatttattatttagcattaagtgatttaacaaaggagcagttaggaagtgcttttatttctatggtaagaaatagagtatataagaattttccacaagttgctgagataaggcaatatgctacaaacacaactgaaagtgaactagatgacagaattgttttagcaagacaaattatgaaaaatgctattgttagatatggttattatagttcagtggaatttgaggataaaggcatacatgcagtaatagatgccctagatggttggcaaaaagtttgctcgatgtcttctgaggacttagataagtttttaacttttgaatttcctaagatttataaggcttatagtagaaataattaccaggtaactaaatattatattgggtatcatgatgcaatgaatggagtaccaaatataaatatgattagttttaaaaatatgggtaagagcctagaaaatataaataatagagttcaaagtttaaattataaaacttcacttttggaagataaagacaaagaaataaaaaaattgaaagatgtcatagaaaaacaaaaaattaaaaaataaaggagtgagattaatagcaaagatatattgttcaaattgtgggaaagaaatcaaagaagatgaggattttatagtagtaaatgataataaaatatattgtggggattgtacagaagaagatacttttacaacttatagagttggaggagaatgtgttggagatgaaaataatactttggaatatgattcaatagaacaatttgaaaaatgtctaaaagaagaaataaaacattgggaaactcaattgaaagaaaatgaaaaaacaagaaatgagaggtatgtaatattttacaaagaaaaactagaatctgctaaaaataaatatgataaatattttggaggaaactatgagaaaaaaattcttgatgtatgttgtggtagtaagatgttttggtttcagaaaaatagaactgatacggtgtatatggataatagagaagttgaagatgtattatgtgatggaagaaaactaataataaagcctaaccttattgcagattttagaaatataccttttccagataatagtttcaagctagtagtttttgaccctccacatctaataaaagtaggagaaaaaagctggctggctaaaaagtatggctatctaggtagtaactggaaagaagatttaaaacaaggttttaaagaatgttttagaattcttgaaaattatggagttctaatattcaagtggaacgaggaacagattaaacttaatgaaatattaaaactaactgatgttaagcctctttttggtaataaaagaagcaagacacattggttgatatttatgaaagaggagcagataaatgacttttaaacaagcagtagaagaaataaaaaaaggtaataaagtaaagcataaaagctggaatagtttaataatcactgaatttgccaataatatagtttgtcttgaagataagagaagctattattatccttatgatttagaagattttataaatagttttatgaaacttgaaaatggttgggtgtttgttaatgacaaggaatataaagaattttttcaataattggaggcaataaatgattagatatgatatagaaataagatatatgttgaatggtgcagaagaaactagaaatatgtattataaagctgttgatgttttaaatgatgagcaacaagaggaagttgttcaggattttataaatggtttaaaaagtttttatggtatcagtacaattttagaaactcatatctgggaacatggtaaagataaagaaaagattaatttaaataaacttaaaaactataaagcattagcttatgcaagtccaatagctcaacttaataaagtaaaagaagagtaccaagaattattaaatgaagtggagataaaaaatgatgaatttaagtacataaaagacagagataactttatttcagaagcattagacttattaactgcaactgtgaatttacttttattaggtaaagtatcagatactgattttaataaacatatagaaaaattaaatgcttatagaaatggaaaatataagaaataagatagagagataatatggagatatggagatgtgggaaattatattgattagctttatagtatcaattattgtagataaaacttgggttaaattaaaatataaaaaatcagtgtattttgtagtatatgcttttcaatgttatacaggaaatatttgtataaaggttaatagccttgatttaactgttggagtaattgaagatataaagaagtatattattaaaataaacaatttagataaatcagagaaaattataatattgaatattattgaattaaagaggtaataatgaatattgaacagataaaagaaaaagaaatagaagatattttagaaacatattcaaaagaagtaaaagaatatgaaaaaataggaaatagagaaaattttaaaaagatttttaaagaaattaaaaacttaaataaatatgatataaaatttgaagatttttatccagatgaagataaaatttatgggaatacaaaaattcaaatagataatattaagatccattttatgtttcatgatttttacagttgggattctaaatcaatgatggaagattatcttgaaggcaaacaatataatttggagatatgttttgatgattatgaacttatagaatttgaaactttggaaactggttataaatgtcttttagagataaaaaatattattgatggagtattaaggaaaaatatataggagttaattatgaaaaaaatatttaaaataccattagaaattgatggtaaaaattggagtttaaataaaatatatgcaggagttcattggacagtaagaagaaaagataaaaataatataagattactggtaagaagcattataggaatgaataaaccttttaaaaacccagtatcaattaaaatggctttcaatagtggattagatgtttccaatcatggatatatttttaaattaatagaggatgctttggtaaagtgtggagttattcaaaatgacagttataaatatgttcaatgcaatataatgacaatacaaaaagcttttaaaggtgtaatagtagaagttgaggagatataatggaaatactaacagcagatatgaaaaaagcaatacagaatgaagttaaaaagcaattagggatattaaaagaaaatgatagcatagaaaagaaagagctaacaccatatcaaaaaactgtaaaactattaaaaaattatagatattataaaaatagaatagaatatttaaaaaataatttagataatattgaaattaagaaaagatattctattggtgagataaaagcagtcaataataataatttaagtgaaatggaaaggaaagagataataaaagaagaaagattaaaagaaatagaattttttgaatatggcattaatttaatagattatgggttatcctcaatagaagaagaaaagtataaagagataatacctctaatttattttgaaaaattaagaatggaagatgttgcagaaaaatttaatgtagatacttcaacaattaaaagaaatagaaataagttagttgaaactatgagtttatcaatatttgatagtgaaattttaaaagatttaataaaaaatattttttaaaaatgcacctaatttgcaccttttttgcccttgtaatgaacttttatatgttatataatgttaatatatgaaaagtttaaatgagagtttaaattttttgtttctctcccccaagaagagatgagttattgacttctcattaaaaagtcttttttattttatgaaaaaaggtgtataataaaaataacaaaattataaaagggggatagaaatatgaaattcagtcttacagattcattactagaaatgcaaaatcaggaattaaattatcataaaatcatatttaactatgatatattaaatgatgaaaataacaattttagaaataatactttttcaaatgtattagcagaaagaaagtataaaaaaagtgatcttattgatactttttatgaaaaaaatctaaaaagtgttactaaaagtgatttaaaagaggaatttaaaaaagaagctgatgaactaaaaaagaaattgaaagaagtattaaaagactataatgaaacaaataacactaatataaagataaattataggtttgatttatccttagataacaaaaaaggagaaatttaataaaattaatcaagagaatctaaaaggttctctttttttatttcaagaggttaattatgttaatgaaaatatgtggtaagtgtggaaagaaaataggaataaatgaagtatgcagttgcacaaagaaaaggcacaaggtatatgatagagagttcagaaataaagacaatgcagagttttatcatagtaaggcttggaagagtatgactgcattatgtaagttaaaagctaatggtttggatctatatgaactggttataaataataacatagttaaaggtactctctcacatcatatagatgagttagaagaggcaagagataaagccttagacattaataacctaatatggataagtgataaaacacatagctatatccattcagaatataataaaaatttagaaagtaaaaataaaatgaaagaagttttatttaatattataaaaaattattacaagtaggggggagtcaaaaaaagtttttgctctttggctttgataccgcttcccctcttttttctggagaaaatgccagaaatgaaattttcagttttggaggtgaaaaaatatggcaggaagaagtagaaaaattattgatataagttcaggaaaaataggaaaagaaaaaataaaagctaggcgagaacaagagaaaaaattgaaaatagatagagataatttaattgctcctagttggttatcaaaagctgcaaaagaagaatttgaaagaattgtttttgaagcaggaaaagtaaatattttagataacttagatttagggatattagccatctactgtaactcttatgatagttatgtaaatgttagcaagaagttacaaaaagaaggtcctgtttgttataaagaaactgccaatggagaaattgaaattataaatcctctaataaatgtccaggaaaaatatgtaaaacaaataatgcaatgctcaacaaaattaggacttgcaactacagatagattaaaattagttgtaccaattagagaagaacctgctgaaaataaatttataactttgttaaaaacaagaaagcaaggctaatatgataaaagataggacaacagcctatgcaaaattagttgtaagtggtaaaaaaatagcaggcagaaaggagtatttagcatgtaaaagacatttagatgatttaaaaaataagaaattagagtataaatttgatgttgaagaggcagaatttgctataaattttgcaaatactttaacattaaaagatggaactaatttaaaaacaagaggctttcaagattttataataggttcattacatggctggaagaaaaaaagaacaaaagaaagaagatttagagaggcttatttgcaagtaggcagaagaaatggaaaaagtttcttatcaggagcagaatctacaatgtttagtacattgttaggaaataaagataggatattctgtgctgcaacaaagcaagaccaagctaacatagtatgggatgaaataagaaactttatagagtctgacaatgatttaagtgaactttataaaataaaagaacatgatagaactataaaaagtttagcaactggaactgttataaggtcaataggtagagatacaaaatcaatggatggttttggaaatattctggccatatgtgatgagctacatgcacacccaaataatcagatgtataaactgttgctagatggtcaagctgatgttgagaatgctttaacattggctattacaacagcaggatttaacttaaatggattctgttatgaacactataaattttgtgaaaagatattagagggagttgttgaaaaagaaactctctttatttttatatgtgaaatggacaaggatgatgatatatgggactggaagaactggcttaaatctaatccttattttttatttgaggaagatggtataacaccaaacaaaaagaaaatagctttatatagtcaaaaagcaatagatgcaaaagagaaaggtggagatgaattaactaacttcttaacaaagcaattaaatatgtgggtaactgcaaaagatggacaatatattgatttgagtaaattcaaagagtgtgaaagtgatttgacacttgaagatatgaaagggaaaagtgcttatttaggttttgacttatctaagggaggcgatttaacaagtatagccttagtatttccattagaaaacaatcaaatatatatttatagtcattcatttatgcctgagttaagacttgcagaacatgaaaaaactgatgatgttccatataggatatgggtaagagagggacttttaacattgactactggagcatttggaataaagactgattataagtttattgttactcacttaaaagaagtaattgaaagatataatattaaaattttagagtgtggttatgatgcacataatgctggtagttttctaagtgatttagattttttagactgtgatttaacagaagttaaacaatctgctaaaagtttaaatgatgcaacagtggattttgctctatcagttaaagcagttcaagttttatatgataagagaaatagtttgttaaaatggtccattgctaatgctacaactgtttcaaatagttttggagagataaaaattgataaacaatctcaaaaaaatagaatagatcctgttgatgcaataatagatgcctggaagattatgctaataaataaaaaagaaacggtaaacaatgatgaagctgttgaagaatggcttgatttaatcaataaaaggaggtgagagagtgaatatatttagaaaattttttaataaaggagaagaaaaaaagcagaaaacagcaattaattctatgaattttggtgaattttttggaataaatgtaagttcagatttatcagaagtaacatattttacttgcttaaaagtattatctgaaagtgttgggaaactatctttacatttgaaagataatgataataacaaaatattaaatcatgaggcattacaaaaattgaaattttcaccaaatccatttatgactccaacacctatgatgacattaatggaaatgtggagaaaccatcacggcaatgcttatgcttatctaagttatgataatagagggcatttagtaggtatttatcctttacaccctcaaaaagttagaatatggatagacaatgcaaaaatattcagtggtaaagaagatttatattatgaatataacaaagatgggaaaatatatctatttcaaaaagatgagatactacatttaaaaggtggtttaagtaaagatggtattgtaggtatgtcagtacgagaaacattggctacaacattaaatggagtaaaagcaagtcaaaagtatttgaataacttatataatagaggattgacagctaaggctcttctaagatacacaggagatttaaacaaagatttacaaaagaaaatgcttgaagcaatagaagaatttattaatactgaaaataacccaactggaatactaccattgccacctggaatggatattgtaccactagatttaaagttgactgatagtcaattttttgaattaaaaaaatatagtgctttacaaatagcagctgcttttggagtaaagccaaaccatttaaatgattatgataagtcaagttattcaaattcagaaatgcaaaacttgactttttatattgatactcttttatatattctgacactctatgaagaggagtttaatttaaaacttcttacagaaagtgaaagattaaaagggttacattttgaatttaatgtagcaagtattttaaaaggggatctaaaaactcaagctgaatgtttaaccaagtatgttcaaagtggaatatacacaataaatgaagctagaaaaaaggcaggacttactgcaatagatggaggtgatgtaattgtaatgaatggaagttatgtgccattagaaaaattaggaatagcttatgaaaaaggaggtgctaaaagtgagtaaaaataagtggttagaaataagaaatcagatagaaattactgaaatttatatcaatggagatatagaaagtgattcagaaaatgatggttttttggaagaagtatggggaataaaagatactaatatatatccattggatataaaagatgctttaaaagaagcagaaaataaagaggtccatgttcacataaatagttttggagggaatatttatgcaggtatagcgatttctaatatgattaaaaatcataaaggaaaaacaatagcctatattgatggaatagctgcaagtgctgcatctataattgcttttggatgtgatgaaattattttaccaagtaatgcgtatttaatgatacatagagcttggggaagagtttcaggaaatgcaggagaattagaaaagtatattgaagttctaaataaacttgatgaaggacttgttaatgcttatatggaaaaagctcttgaaggtataacaagagagcaaatatatgattttatgaaagaagaaaaatggtttactggggaagatgctccaggagtatttaatataaaaacttctgaaaaagtagaatttttaaattgtatagaaacaagaaataaatttaaacatattccagaaagtttattaaataaaaaaagtgttgaagaaaaaaataaaaaagaacaagcaagacttgatagattgaacaaagaaattgagattgcattattaacaggaggtatttaattatgaaaaaatcagtagaattaaaaaaggaattagaaacacttagaaatgaaattaaatcattaaaggacagtggaaagattgaagaggcacatgctaaattaaatggattaaaagaattagaaaataaaataaaagaagcagaaacagaggaggctttaacagttatgaataaaggtgataaagtaccattaggaacaaaagaagaaatgaatgttaatagaatttataatagagttctattaggaaaatctataacagaagaagaaaaacaatttttaaatgcagctggaacaccagggcaagtagaagcaacagatgggaaaggtggttatttagtaccaactgaacaatttaaacaaataaaagagttaagaagaaatttagtatcattgaaaggctattgtaatattttgcctgttacatcattaaagggaagtatgcctatcgaaacaggaagcacaggggaattaatagcatttgaagaattgaatgaaatcaataaatcagatgttgattttgcacaagtaacatataatgttgctgactatggagatattatcccaatatcaaatactttattagctgatgaacaagctaatttaactgattacattggaagaagatttatcaaaaaagcaattaatacagaaaataaaaagataatagaaatattaaaaactttaacaccagtacaagcaactgattatgatgcgataacaactgctttaaataaagaattagatccatcaatatcattaaatgcaaaagtttttgtgaaccaaacttattttgatgttttggataaggtgaaagataaacaaggtagacctcttttaggtaatagcttacaagatgaaactaaaaagctatttaaaggaagagaaatagttatcttatctgatgttcaattagaaatgaatggaacaaaagcaccagtatttgttggagatttggaagagtttataacattctttgatagagaaggtttagaacttgcagtatcaactgaggcaggatttactaagaacgctacttatattagagcaatagaaagatttgatgctaaaaaagttgataaagaagcaatgaaatatcttgaaatagaaactgcttaataggtgattgatatggcagatattttaactttggaagaagctaaaaattatctaagaattgattacaatgaagatgatacattgttgcaatctttaatgattgcagcaatagattatcttagagatgcaataaatgactttgataaaaaagtaacaaaagaaaagtttattaaaaggtctaaaattctagcttgtgtacttgtgcaagattggtatgataacagagagcaaaaggaaagtaaagaccttagttatacagctagaagtttattaactcagttacaagtaggtgataactttgaatgatataactaagaaattaagacattttattgatgtatatcacatgatagacacaactaatgaacttggagaaaatgataaaaagccagagttatttaaaaaagtatactgtgaaatagttcctttaaattctagtgtaaaaaatggagaagcaggaacagaagaaaatcaacatcaattcaaatttatatttagggtaaaatcagttcctggaataaaaaaggactggttttttatttatgagggattgaagtatgaagttatttattttaacagagattttaaagataatcagttcatagaagttttttgtgtaagaaaagaggagtagttttctgacttgacaatataaaatttataatatatattttaaatataaaattaaaattttatactggggtgagaaaatggaaaaaatttctgaaaaaattagtaggtttgaaagattaagattttatgtaatttcattaaaaaaagaagatataaatgataatgttaaagaaaaactgcttgatataaaagaacaagcaaaagatgttattaaaaatatacctagaacagatggaaatacacatatactaacaggtcatgcatatgacattatatttaaaatagatgaacttttaaattaaagccttttaaggcttttttcttttataaaaatttctcttgacttttgagtaccataagtatataattgttttatggaactcaaaagcgaggtgatggatatgggttcaaaaatgggtagacctgttatgggaagtccaaaaactaatgatattaaagtaagaattgatgatgaaactttaaaagaattacttaaatattgtgaaaaaaatggaataacaaaagcagaagctataaggcagggtattcatttgttattaaaaaaatagaacacttaggagcgtgtcggcaaactcaatcctaaatgttctggcacaagaagtcaccctcttatgaaatctattatatcataagggagtacttctatcaattataattttgaaaggagtattttttaattatggacaaatttgagttagaaaagttaagtttaaaaatggaagccttagataatttattactagctatggaggaaggtatatttaatgggaattatagtgttcaaaattttagaagtggttttgcatatctaacagatatggctaatgaaattagtgatgaattaaaagaaatagttaa

SEQ ID NO: 2 - DNA, 37943 bp, Artificial sequence
  bacteriophage genomic nucleic acid sequence
aatcttattatattgataactttaaaagtttaagaacaaatagtataggatatagtcttaaagatttagttgtaggtaatggactattacaggcaacaacaagactatatgcagagtatgcaacaagtaagaagctagttactaatcagaaagattttgagcttataaaagattttgacctagatgatttactaggcaaagctatggttattcagtcttgggctggtaaattgcttttaaaaggagttacacagcttgatagatttagtttctatccagtaacaccaaaagactacttccctataagaaatgaatataatccgaaattaatagatggatatgtaatctataacctatcacaagatgataaaagcaaaaaaacgcttatatgtgaaatctatgagcttgatagtattgaatatagagcatataagataatagataaaaatatacaagaattgccttatccttatgatttaaaaattaatggaatgataccagatggcttaggttatagagataatcaagcacaaggttgggcagtagttgaaatagaaaatatattcggtaaaagtgattataatgatgatttagttggaaatgtaagggagttagtaattggagatactttaacatcacaagcgtttcaaaaggttgctaatccattgttgcaagttccagacagtgtgatagaaattgataaaaatggtcgtagcactgtaagactagatggaagagtaattattgtaaataaagatgataaagaagttaaacaagtgcagcttgaaacaaaaacacaggaatggaagttacacaaggaagacatcaaaaatgatatttataaacaactaggagttaatgatttagcttttggaattgatttaggtggaagtatatcaagtggagaagctaaaagaagaagcctagaaagaactattgcaacagttgagagcaaaagaactaaatgtattactggaataaaaaacataattctatggggatataagaaaataaaaggtgaagaaattgatttacaaatagaaacacaagatattttaagtttatcactaactgaaaaaatggctattgtagtgcaaggtattcaaaataatgtaatgagtttagaaacagctatcaagtttttaggtcttttaggagaaaaagaagataaagaaataggatcaataaaaactaatataagttatcaagaaaaacttataaatattttaaatatactagctggaataacaagagaagagcaattacaagttaaacttgaagaactttcaaaagatattatgaaagatttagggcttgaagttaaggaggaataacatatgttcccacttgcacaagaaaatagattaagaataatatttcaattctataccaaaaaaagagttggaagagcaagaaaaagcgtaagtaatggacaattaccattattcgaattaacagatgatgaaaaaagaaacattataaaagatttaacaaaggttgctattgatgttaatttatcagtttttgagagttggagaacattaacagatgaagatttaaaaagaactgatttaactggtgctaaatactggataaaaaagaattatgatttattcaacaatacaacagttacggcagataaattaatggatataaggcaacaaaggataatagatacaatcaaaaattataatagaaatttagatgtattaaaaaatggagaagtaccaaagtctacattaaatgctttgaagcaggatatagcaaataatagggccagtcaagaaattaaagatattgttaagagtatagaaaatgggacatatactcaaaatgatattaataatttacaaaaatggctaactaaaagaaatgaaaatcttgcaagaaatgaaactggtaatttatatgcacaagaatgtaaagacttaatgattgagaacggtatagagcattttgtttggcatactatgaaagacgatagagttagaccagaacacgctgaacgagagggtttagtatttagtatcaatgatgaattaccaggagaagattttaattgtagatgttgggctgaacctattagattaaattaaattttgtgtgagaaattgcacgagaggagaaaaaatggaattaaaagatggaaaaatagtaataagtgatgaagaaaagaaaatattaggaagtgatgaaggtaagaaatggctaactgataacaaatttatgattgaaactgtaaaggaagtagacaagcctttaacagcagaggcagtaactagttttataagtaaaaatcaaagtttatcagataaactgtataatgacaatgctattaaattcttaaaatcaaaattaggagataaggtaacttctgatgatttaggaaaagaaatagtatttaaaaacagttttgatgattataaaaaggaagctattaaaacagcagcaagttttgcactaggagcaatatcgccaaaatatagttcaatgcttgtgaatgcagtagacttttctaaattagatattaaagatggtaagattacaggttttgatgaacaagttgctaattttaaaacaacttatccagatttatttaatgataaaggaagtactacaccaccaccattaccacctaataatggcaattcaaaagttaaatatgaagactttttaaagatggatgatgtggaaaaatcaaaattaacagatgaacaattaaaggaaatattaagagaaaaataggaggctataaatatgtcatatcaaacttttaaaccagaagtatgggcagaattaacaaatagaaatttaaataagcaattagtttttggagcattagcaaacagaaattatgaaggaaaaatagaaaatatgggtagctctgtaagagttccaagtatagggtcagttactgttggagattacacaggtgcagatataacattccaagaagacacaggagcatatcaaacaatcaatatcaataaagctaaatattttgctttaaaaatggacgatgttgataaggctcaagctataccaggggttatagaagcattaacagaccaagctatatatgaaatggctgatgttgttgatatagaacttgctaaattatatgcaaaatgtaaaagcaaagttgctggtgttataggtactgataaagtatcagataaaataatagatttagcagtaaaaatggacgaagacaatgtccctactgcaaatagatggcttgtaatttcacctgaaatttatgggcaacttataaaagaagttccaacaatttcaaaaggagaaaacacactaggaattaaccaaagctattttattggaagctggggaggatttactatttataaatccaacaatgtacaaagaacagcaaaaaaatatcactgtatggcaggagtaagtgctggattaactcttgcaatgcaaataaacaaaatggaagctggaagatttgaaaaatcattcggagaatatgtaaaaggattacaattatttggttgtgatgttatggaaacagaaacaggtaaaacaaaattactatgtgaattagaaatatcacaagcataatggagagttaaaagctctccccttattttaaggaggctgaatgataataggttatgttagtttagatgaggcaaaaaaatttataaaaaacagatatgaagaaatatctgatactgagctatcaaaaggcttatacaaagcattagataagattgaaagtttaatgattagagatagtggaaaatctgataaacaagaattaatatttcctagaattgatgaagaaaaagtacctgatgaaattaaaaaggcacagatattagaagcatattcaatagttaaagacttggaagatgacaatacaagtgatattgaaaaaggcattgctagtaaatcaataggggatatgtctataagttacacaacaaacaatgctaataaaataggaaatattgtttttgcaaatttacaagctaaggctattctttataaatatgtgagaaaaacttatgattggagttaatgtaaaatttacaactgaaagtttaaagaagtttgcagagatagaaaaacaattaaatctactagcaaaatggaagttagttgtacagtttaatgaagataatacagaagaaaacgggcaaaaggttgaacttatagcaatgtggttagagtatggaaaagagggttttaatgttcattatccagctcgtccattttggagaacagcaatagacgctaatatgcaaagaattatgaacagatttattcataatgctaaacaggtagcagagggcaaaatgcaagccaagcaatgttttgaagatataggtaaacaagttgttcagtatattaaaaaaagcatagaacaaggaagctgggtagaacttgcagaaagcactataaaagcaagagaaagaaaagggaaagatttaaagcctttaattgatactaggacaatgattaatagtttagagtacatagtcaaggagatttaaaatgaaattcaagttatcacaatttgctaaaaatgagttaagaaaatatcaagtaactagaaaatctgaatatgatatacacaagccagatggggcagatgaagtttatcattgggatatggttatttataagaaaactctaaaagtagcaacagcagatcctaattcagcaataaaagttttaaatcaacttaatggaaagatacttaaaagctatggattaagactaggagatattataacagttgaaagtattaattatagagtagttgaattattacctagattatatgcagattttaatgagtttgtgttggagatgatgaaagatgaataacatagatttagaaatattattcctggataaagtaaaagaattaaataataaatttcaagttataccatttgaacatctttcaaaagtaaatgggcaactgaaattaccaagagtaatagcaaggactatttctaataatgttattcatagatatacaaacgaaagagaagatacagagaaatacggagtatttaaacaaacaaatataaacaagcatataataagtttttcatttactctaaataagaaagatagttatgcagatgtagcaatagttagggattatttcactaatatagaagctataaattggtggattaaactcaatggattaaagtttgttattgaggaagttggagaactaaaagacattacagattatacagctagtgatttattagaaaggtatgtatttgatgtagttgtaagaacttctaaggaattaacaacagaaatagaaatcataaaacaagtagattttgaaattaaaggaggcaattaatgggaataatattaggtgctgaaaagaaaatagtatttttaaatacacacaagccaagtcctgtggatcaagcaacagtaaatgtgattggtgtatttagtactaagaaagctataacagagcaattaataacaagtataaaagatgtaacaggagttgcagcaacagatgatgtctataagatattacaagcagcattcacagcaggagcaaaacaagtattagtatttggtaaggtagtaactggaagcaattataaagacttatttgacagtgtaaaaaatgattggtttggtactgtaacagatgaaactgatatagaaaagataccagctatatcaaaagaaattgcagcaagacaaaaaatgttatttgcacaagtaaagactgatacagatattatgacagcagaagcaaaaataaaagctattgcagaagatacaacttcattattttttagtaagaatgatgaattaatagcaggagcagttgcaggatattcaataccacaatttccaggaagtgttttaatagcaaataaacttataaatggagcagttgaaagtggactgattggagcagaacaaggagttttagacaagaataaagctaactatgtagcaagaatgaaaggacaactaggacttgctaatggtgtaactgtaacaggcgacccaatagactttattcactgtgtaaaagcattgcaatttagacttgaagaagatattacacaatatttaaaatctactccaaagccaacatttgcagatgtagacccattaaaagcagttatattaacaagatgtaaacagtttgaaagaatgaagtcgttaatagaagataaaacagttgttgatatagtgccacttgaagaaataccaaagaatgacatattaaatggtaaattaacaggtgtaaaaatcacagtttactatgcttatggtattagagaattgtcagcagatttgttctttgaagtttaggaggtgctataaatggcaaatatatataattacaacagcaaaaactatgaattaatcataggtaagacaagagttgaagattatgcagaagatacaaaaattactattgaatatgatagtgattttaaaagtttaacaaagggtattgatggggcaagaagcataaatcaacacaatgattatgatgcagttataaagtttaaggtattgcaaaattcaccattgaatttaagttttaaacaaatagcattaacagatggagaaaaagggactttccctgtaacttttatcaataaaggtttagatggaacattaggagctttttcagcaaaaggcttttttaagaaaatacctaatttagaaataggagcagatgcaaaagcttttgaatgggaagtacaatgtattaatttaaaattagcataatagagtagtttttactactctatttttggaggatatatggaaaagaaaataattaaagttaataattatgatgtaacagtaatggaacagccagcaagttatgttttgaatttagaaaagagaatagggagaactcatatagttgactatacaaaagaaattttaaaatatcctagtggagttaatccaaaattagaggatattataggagtaccagaagctataaaacataatgatttagagttaaaacttgatgataatggtatttacacaatggaacagttatttttagctggaatagacagtgttgtattcacaggagaaagatttttgaaattattaaataaaaatatagataattacaaatataaagaaatagaagaaataggactatcagtttgggagcaagtgaaaaatatagctttctgtggtttcattatgaatacatttcgtggaatgtaacttaaattataatgttgaaagtatagaaagaatgataactgtatatggttattttataagagattttgaaagagctgaaaattattcaattaaaaaattagtagaatatttagatagaatttcaaaaataaatgaggtgtagtaatgagtgtagttggagcattaaaatttaatataaatacttttttaaattcaacaggctttcaacaattcaaagctaatttaaaacaatctatgagtttgagccaaagatttaaagaagtaacaggaagtacactaggaaagttagcaataggctatttttcaataagtgcccttgtaggtcaatataataaggcagttgaagcaagtaactatcaaatagagcaagaagctaagttatataacactttaagagctcaaaattttagagatgaccaaataaaatcaattatagatatgactggagaattacaaaaattaggagttgttggagatgaagtaactattgcaggtgctcaaagactagcaacttttagaatgcaagaaagcagcattaaaaaattattgccagttatgcaagatatgcttgtaaaagaaaaaggcttaaatggtacaggacaagatatggaaggtattgccagcatatttgccaaagctatgaatggtcaaacaatggttttaaaaagaaatggaattgtcttatcagaaagagaggaacaattactaaaagtaggaacagaagaacaaaaagttgccctacttgcagaagcagtaagaagaagtgtaggagatcaaaataaagaatttttaaaaacacctgagggtaaaatcataaatgccaaaaatagaataggagatttatacgaaacttggggaatgtctataagagatacaagagcaaagttttgggaatttattgcagaaaatgctgatggtattcaagatttagttactaaggtttttaaggctggtggaagttttgtagatacttttattggtgtttttagagatatcaaaaggggttttaatgcattaccagacggagctaaaacagcttttaaagttataggaggtttagcacttgctacacaatttccgttagttgctttaggacttgctattgaagatgtatttgcagcatttcaagggaaggaaagctttacagaagatgctataaatgcactacttaaatttactggtactgattatagatttgcagatttaaggaaaggtgtatctgatttttggaagttatggactgagggagcagatagtggaatagaaaagataacacttacaactaagattttatgtgatttattagatgttttaaaaggtggagcaggaatattacaaatgatatggggtggaacagttggtgcagtttgggacttcgggaaaaatacatataaggcattaactggtgattttgaagatatgaattgggataattcatatggaaatattaaaggtggttggaatagattgtatagtgctggtcagcatatgaatgaaactggtgcaatgcacgatacttatttacttgaagaagctgaaaagaaaataaaacagcaatcagaggctgctgattttaggagaataaatcaaggaaaaccaggagtaccagttgaaaaagattttgtaataccatatcaacctgttaattctggtgttgttactgatttcaataagttgcttgagcctaaaacttttgataataaagttatagatagaactaaaaaagcagtaacagctaatcaaacagttaattataaccctacttataaaactgatgtaacaattaatgaaagtaaagatggtaaaaatggttttgaaaatatagtaaattttttactaaaaaaagataaagaaaatttagaaagaataaaagtacaagtaggaatgggtcttacatattaggaggatattatgagttttttcaaacaagcagttgatatggctctaagtctatcagaaaactcaaatcaaagctatatacaagatataccacttgaagttatatcagaaaagacgagaagtttatcaatgacattaccaactaaaagagttgaaaatggttttaatataagtgatagtgttagaaaagagcctatgataattaatattacagttgtagataacagcagagattatttattgaatagagataaattaatgaaattgcaagaattaggcgaagaagtacagtttgtattttctaaccgtgatacttatgaacatatgataatagaaaatattgaagaaatggaaacaggagagcaaaagttcggttttacttattatataactctaagacaaatacaagttggagagataaaagaaactgatgtaaaaatggatagtaaaaaagctaaaacatcaggtggcaaaaagaaaagaacaacagctaaggttagcactccaacaagtgcagaaaaaagtaaagtcaataaggttgttggtggaacaacagatagagataaaagtgtagcaaagagattttttggaaggaaaaaaagatgaaagcaatagaaattgatgtaacagatatagagagtagaggaataatagccgaattacctaataatatagctttagaactaatttataatacttatgatagttttatatacctatcaattttagacggcttaaatcaaaggataacaggttttaataaggtagtacctaacattgattttttaagtttagtaagaaatgaaactaatcttcaattaagatgtataaaaattaatgaatttgcagaagaaaaagataaaattactcctcaaaatctaaataaagactataaattctttttaataggtgatgaagatggcgaagttatggaagcaagttagattaataacaataggagagatagtttttgattatgagcagctagacattgattttgaagttaagtgtactgatgataataagagtgatatagcaacaataaaactatataacttatcagaaacaacaaagcaaaaattaaaagaaaatcaagatgtgtctattgatgcaggatatagagaattacacggagttatatttaatggcatagttgaaagtataacaacttcaagagatgaaaatgattttataactactattgaagcaactccaaataatagagcttatacgaatactattataaatagacaattcaaagctggaattaaggcaagtgaagttataaaacagattgaaaagatgtgtaattttacaatggatataaaggaactaggtaaagatactgtgtatccaaatggcaaggtatttagtggaagattatcaaatgtgatcccaattcttgcaagagatacagggacaatatcaaggtttactaatacatctattgaatttaagttacctaataaagtttattcaagtgttattcacttaggaggagagcaggggcttataagagtagataaaaaaatggataaggcagaaataaaaaaagatgaaaagaaagccagtaaaaatactaaaagcaagaaaaaaagtaataataaaacatctgggaaaggtaaacaaaaatttgatattgaatgtttgctaattccacttataaaaataggacaattattagaaattgaaagcacaacttttaaaggaaaagtagttgtgaaagagtgtgatttttcagcaagtggagtagaaacatttagtgcaatggcaacagtagaggtggtttaatgatagaagttataaaagcattaatagatgatagtttgaacgaattgcacacaagtttaccttgtaaaattacagcaattaatcataaagctggaacttgtactgtacaacctctcgctaaaagagagctatgcaagcagcttataaactatcctccacttatagatgtaagattagattttcttaaatttggtggttggacatttcaaatacctcgtaaagttggagatattgtatgggttgggtttagtgaaacagcattatcagatgaaacaagccttgaaagatttagtttaaatgagccttatatcataggaagttgtgagaaaggttttgaagataattcagaagatataattttacaaggtgctggaactagaatagaaattaaaggtaatggagatataacaatacttgccggaagtaatgaaacaactatcacaagtaatgttactttaaatggtaatttaactataaatggtaatacaacacaaactggggatactaaacaaacaggaaatgtatcaataactggtggagttacagcaacagaagatgtacaaggagcaggcaagagccttaaaggacatacacatagatataatccaggaggagacccttcaacttcaacgagtaaagcagaataggaggatatatgacaagtccaaaattagacagagattgtgaattagtatttgataacggagtgtgtgaaatagttagcaatgcagaagatttagtacaagctattagagttgaactggaacaaaacaaaggacagtttgcattaaatacagcttgggggactccgtacttaaatgatactaacacaggtattttacaattgaaagataataaaaatagaataattcaagaagttagcaaggttataaataaatatgatggtgtagaaaaaattgaaagcattgaatttgaagataatattttagttgctaatataagaattaatggggaggtgtacacaatttgataacagaaaaaggttttatagtgccaacaatagatgaaatatacacaagaaaattaaatgattttaagagtgtaaagccagatttaagagaaacagacagtaatattataattgcttggcttagatttgatagtgcagaagaatatgatagttatttacaagcattatcagcatttaatcagttatcagtttacacagcaactggaagcaatttgaatgctataacaagccatttaggtatgacttggaataaagcaaaaaaagcagtaggcaagattacaattacagctgaaattggaacacaaataccacaggcttggggagtggaaactaaatctggtgttaaatttgtaactttaaatacatctactattacaacaactgaaagagaaacagatattgaaataatagcattaaatgctggaacagatggtaatgtaagtagtggttcaataacggagcaaacagaaattttaactggtgttatatctataaataataagttaaatactcttggaggcaaagacttagaaactgatacagagttaagagaaagatatttaaaaaggctagatagaaagagttcgtttacaacagaggggataaaaaattatatacttcaaaatacaaatgtacagaaatgccaagttatagaaaatgatactgatgattttgatagtgctggaagattagcacatagttatgagtgtatttgttatggagatactaatgacaacatcttgaaagcattgtatgagtataaaattgcaggtattagaacagttggagatattacgaaaaaattcggagaaataacagtaggtttcacaagaccactagaaaagactatatatctaaaagttgaagttgaagctattaaggagatttggaaagaagattttaaaaaagtaataaaagatatttatttaaaatatttagatgaagttgagccagctggaactatttacctatataaattaattggagaaatttataaaaatacaagtggtataagaacgctaaaacttaaattaggagatgtaaagtacagtgagagggaagctgattataaattatctactaaggaagttgcagtagcaaatgaaaatgatataactattgaggttaatcaatgattttaaatcgtatccctcacatataccacaatacagtatattctaaaaaaatgtttgaaatatcagaaaacaagcattttagaataagaaatatttataatttaatttccaatttcaatgatatagacaaatcagaaggctatttattggatttactaggaagtaattttaaaattcaaagaaatggtttgaatgatattgaatacaggaaaatactaaaatttgaaatatcacttttacaattcttaggaagtccacaggaaattataagaattttatcagagtattttaaattgaacgaggaagaatttaggatacttgagctatctgggaaaattcttataagtattccagagaaattagataaaaaagaagtatttaatttagttagaaaaattaaaggtgcaggtgtaggtttagaaattatcaatggagtttatgtagaagattacctaatttcagaattacacgaaatgacattagaagaaattgaaaagatcacactagcaagagaagaatactatattgaaatgtatagtttatcagaacttgaagaaatggaattaagtcaattagaagatattaaaatttcaaggaggtaaaaatggcacaatggatagaagacccacaaggtagattagaagttgagaaagtaacaaaagaactaaaattaccagtttggaaagcaaattataaaggaaaattcagagatttttggaatgaattatgggataagattgaagattatgttgttaaattaaaaggtgatacagaaaaaaaatcagaaggattaaacgatagacttgtatcagcagtaggaaagcacgatggagattttcctatttcaaatgcaattgtagggaatgtctattattcagaactaacaaaaaaatattataaatgtaaagttggtggacctgcacctatgccaaatggaaattttatagatttgtcaattttggaaaatcttaatagattggaaaatttatttaaagtggaaaataaagatgtaacaagtaaagtcacaaattgtaaaaacgcaacccttagaaagatgaaaatagatagattttgtattatgcaatttactgtatcttcagaagttattgcgaatataaataataaatgtactatctattttgatgagccttttaaagatgttccttttatatctatgacagataacaatgcaggagcaagtagagcaacttctccttcaattgattggggtacaactacacaaattacagtatctaattttgaaggagcatttacattaatggctattggatatatttagagcctagctagagtttaactactgcatttaatccaaggaccccaagtattataaccttcgtttgcttgatttacacgagtatacatggaacaatctatacacattttaaaaatctatctgtgatggaatagataaccaaaaatactaaaaatttgaaaggagaacaaattatgttttatatttattcaaaagaaaaattaccaaaattattatttgatgtaaatttaacatcagaagaagttaaattatatggtggttgggatgttattttttcatattatcctgatataaaaaaagatgaaacaataatagttgaaagaaatgcaccatttaattatccaattttaaatggtaacacaattagagaaattacaagagaagaaaaagttgaaaatgatatagaagtacaacttgaagatggagaggttataagagataaaaagattgttaagatagaaaagcctaaaaaaaatgaaaaatatttaacttggaataaggaaaaagaacagtggtattatgatacagagagagaacaaaaagattactttaacacaatagataatataaaagctgctgtattggagtatggatttgattatcaagtaaaaggggaacaacatagacagagatgtcgtgataaagatataactttattggcttcaaatgtaacttttatgttggcagaaaaaactatttatggaaaagaaaaacctataacttggtattttgaagataatttcggtttagaattagatttacagaaatcattagtgttagctggttttggaaaaacttttactcaatcagtttatgatacagaaaactattttaaaacagaggtagcaccaaaagaagttacaaaagaagaatttgaagctaagagaaaagaaatacataataaattggtcaaaatgtaatttaaaaagtttaaattaattagaggtagttttatatagcttcatctaattaataactcaaaacagcaaattacaaagtctaattaataatttttaagaaaggagttgataaaaatgtatgagttttctgaaagaagcaaagaaaaacttaaaactgttgatataagacttcaaaatcttatgaatatagctataaaagaaagtccttatgatttttctataacagaaggaattagaactctaaaaaggcaaaaagaattagttgcacaaggaaaatctaaaactttaaaaagctaccatttaacaggtaaagcagtagatatagctgtatggattaatgggaaagtaacttgggattttaaatattataaagaagttgctgattgtgtaaaagaagtagcaaaaaagttaggttatgtaattacttggggtggagattggaagacatttaaggatggtccacatttccaaattgaaaatatttaataaacagtctggtcagacagttattataaaaaaattatgcccggaagaaatttaagctttttgccggacaagtatttattagtatttgaaaattttaggaggtaataatgaaagattttattaatcaaacagtaagatatttggcaagttttagtatggaacaatggttatggatagcagtagcaggtgcaattttagtttatcttatttacaatagaaaacagtatgtaaatctatttagacaatcagttatttttgcagaagaaagttttaatcacggtgaaaatggaaagaaattagaagcagctgtaaattttatactatttagaacttctagtttaccttggatagcaagaattataattgtaaaatttattagcagaaaaagaatgattgatattatagaaaagacattacaaaagttttctgatatttttgctaatggatataaagtagatataaaaggtaatgaagatggagaaaactaaattaatcctggatccaatttcaaatgggaaagcagttttaatgcaagactatatctactctattaatgattatgatattaaggtatttagaggcttcatcactgatggagcctctgtacctaaatctttgcaatggctatataatccttatggcaaatatattaatgcagcagtaattcacgattatttgtacagtacttataacaatactggcataaatagaactcttgcagataaaatatttaactttattatgaaagaaacaggagtagataacaggaccagaagaaagttttatatggcagttaagtattttggagaaacatcttggaaacctaagttgaagaatgagggatacaaagatagagctgttatagataggaccaaagaagcaagagagtattataatcattggtataaggtattagggttgtaggtggtatatatggaaaaaacaatattagaatatggcatagttggagccattttattgtattttttatggaaagataaaagtacttttgaaatgtataaaaacactatgcagagaatggctgatttactagaagcaatacagaaagagcagtcagaattaaaaaaagacatggaggagattaaaaaatttataaagtaatggggtaggattttgtcctgcccctatttttttattgtttaaaattttaaaaaaatatttaaaaaaagcatttacataatcatatgattatgatataattatatcataaagataaaagaaacttaggaggatctaaaatgaaactatttaaaaatgtaggacttcaagaattaaaagacatattaaaaaatggaattcttccaatatcagtaactggaaacgataattgggaagaaaacaacagaagtaataattcaaaagatgtagtttatttattttctccaaaaactgaattaaatacatttatgcaatacggattagttttattagaagtagaaacagaaaatgctattaaaaatgaatttatgaaaaatgatgtaaataaagattgttatgatgaatttataaaagacaaaatagagcctaatgaaatcaaaaaaatatatattccaaaaatttttaaaagacaaatagataaaactaattttttaaaagatatagaaaataaaataatatgggttgatttaaaagatttacccactaaagaagaattagaagattataaaaatactgtaaatgtatcagatttttataattatctaagaggaaaattaaatgctagaattgaaagaaaattcttttatggtgaatttgtggaagttgaaatatacgacgaaatgatagatatcaacttagctaatactataattttttaaggaggaaaaatgctactactcacagcagactatttaaaatcaaaaggtgagcaaattatctatgaatttgaaaatgtggatacctatttaaatttgtgtaagaaatatcaaacaaaagaaacttctattatatataatgaaagttttgatttgcttaacgagctcactttagatttgggtatgttcaattacaaagaattatacattttctttaaaattgaaaaaataaataatacagaagttctttatatttatgattatatagacctagattataaaattaaagatacaaaagagaattatgctagagtaaaatctaaagatttgtataaaatgctattgtttcaattaggaaaaatttaggaggatatatggaaaaaagaaaaggttataaaacttcaaaagagcaagttgaagctaataatcgttatttagaaagcaataaagaagctagagaaagaaaaaaaatatcaaattataaaagcaatgctaaaaatttcattttgaaatatgctaatttagaagatttaaaagagattgaaagttttataaagaaaagagaaaatgtaataaaaaagtccagttgttagctgggcttttatttgtataataccttttttatatatagaaccattttagaaccaaaggcaaaatattaaaatagattttcttttaaaatcaatagaatattgtatgtacttgtactattcccactctattttataaaacttttaacaccttgttttcttttgttttaactttatgcagtttacaaaatctacttaaaaattttgtctttaaatttttttagaaccaaattagaaccactctaaccattcaacacatcatttaatctatcttctgaactaggacaaatatggcggccgctataataaaacagggcttcccacttccctgttttatcatctttatatgctggcataattaccaccaagcctttcaaataaatagtcttttaagatttttcctcttatggtcctatatccttttgcttttaattcttcgttaagttctcttataatcttacaagcacaatcatattctagtccagttaatgccataacttcttgtgggtttattaatattttgtcttttggtatttccattttaccacctcatactttaaatttcaatttttatgcagttgctggagaacgatttaacattctagcaacatcagctgcattatatgttaagttatccattttatctcctttccaagatataattaattatttccatatctatcaagaaacttaatatgtatatccaaatacttaaatctttattaaaaatacaagccattaatactattaataaaaatatcatcaattccactccttcccaattcttttcatatttttttgccacttttcccagtagcaattaaggatgtcatcttttgtatagccataacttccagtaattttaaatatctcttttgcgatagataaagaatcacaattataagctggaagaaataaattattcaaaatcttagaataataattatattcaaatttttcattaaatgaatttattatctcgtatttaacaactccataactttcgctgtgttctattccaaaatttaccatttgtgctaaaaagaaatacatatcagtaagttcttcaagttctttttgtttatcataaggtttagttttccaagtcttatggctttcaggagtttcttcgttaaattcaatatattcagctattaaagataaaacaatatctctaagtgttctaggtctaacattattcaaattttcatctaaatgcttttgtaattttaatatatcttcaaaattttctggtcttttaaattccattatctcacttccttatttttcttttaataccaatgctggtcataaatttttagttgttattttcttttaatatttctgggttttcataaatattccctaatacttctatatcttctttatagtaattcattcccaatactgctaatgctctaggtttaatatattcaacaataaaagctccccattcatcataatatttaattactccaattccgtgattagctctaagttttacaatatccccctcataaatttctttattatttttatcttttaattctgtgtattgcataagttcgatattttcaaagtaagctcctattatttcttgttcattattttcataatcattatcaatataattaatcacttcattcataaagtcaatttcttctacatcaactatttcttttccgtattttaaccaagctctaaatttaatctctctcatcttcttcctccaatctctctggcaaatctaattcttaattctttaatactataatcagccctgaattttctatatgtcttgctttcccattcttccaattttttaaaatattctggatattctttatatagtacctttaattcccttaaacttttaagagggcaacaccagcaagaaactctatgaaatttcttatataacccattccagctaaaacctttgctataacaatattctagtgcttcttgctcagttatgccccaatctgcaagtggatatttaatattcttttctttatttttctctaatcttttcacttcatcaactgcaatcccatggtattcaattatttcaaaatctttgtaattttcttttatgtacctttttatcatagattttttaaaatattgagtacaccaacgattacgaaaatctgggaaagagtaacctttttgtcctttattcttacctttcttcttttcatactcaagtaacatatattcaaaactcttctctgctcttaatcttgttactttatgatttatgtacttttcaactttttcaatatgctcatacatttccggaaactctacaccagtatccataaatacaatgtcatctatttgtaatcctttttctaacatcattaaaagcattgctgtactatcttttcctcctgaaaagctaacaacatatttaatcatttccaatctctcccgctcttaccttagcccagaacttatctagttcttcttttaccttttctgcttcttcttctgttttgaaataatttccccactcatatctcctttgatcttctgggaaatagttatctgtggtttctgaaatttcactatctccaaatatactgaaatatttatcacttctttcgcctctccatctcttaggtattccatatttttcatttattttatttactttttctaatatattttttaaatcttctttatcaaccaaaaatattctattatctacgctttctgcttcgccttgtatatataacttatttttaagattaatataatctggtgcacaagcactctccactattatttcttcatctttaaactctcctctttttaatacttcaaaattttgatatttaattcttattgctattttatcaaaaacttcttgagtttctatctctaataccttttctttttccattacttcctccattttttataaaactctcattgacataactatataagttatgttggtattactaaatttaatagcactgctagatgtgcttaaacttatattaaaaaattcattttttatgtgttttagccataaatcaatgtatttaacatttaagttaaatttaacatctaaattatctttgttatattcaagcagattgtctagtattaattttgagtcctcatttggatatgcttcaacacttactttgttatctttaaaaataaaatattttcttgtatcaaattttgttagttttagcattttccaaactatatctgttgtaactttgtttataacattagcctttaaggatgttgtatattcatagctctcaataactttttttatatttaatgcttttttgtttagagcttcatattctgttatttcagttcctatttgaatggctaatttaccattatttaatattgctattgtttctgctttaaaaaattcatttaataaagttatagagtatagttttggatcatctacaccttttctttctttatctgtatcttctactgcaaataatctatatgtatctgtaaatcctatatattttccagatattattattccttccatatttagatttttagctatttctttaaaatttaataaatcttttatatcttctttatcaaaagctaaaacaattttatttctattcaaagacaaatattctcttatattcaatttttttctcctttcttaattctgccaacttaatttttaacttggcaatatttaatcctgtcttagttaattcagggacaaaactgattaatctgcatctattcaatacctttaattcatttctagttacacaaattagattttcaatatttaaattatttttatttccgtctgcaaatataatcacactattttctgggattgctccatgttcttgttcataaagccatctgtgttttcttacccatttgtttagtttgtctgttttaattaagatatatccatctttatccactctttctgagtaaagttctcgtgtatgccaaggactgaaaccttttttaaaaccattggtaggcttcaaacctgtttttattcctttattccagggagtgaatccttttttaaatctagtatcactcaatttagccctccaacatcttaggtagtttattatcagcatttaacatatcatctttaaatttagctgctcttaaagctaaatctccattacttataattacatttgctatctttatcatagattcacttctggctatttctttttctaactcttctggagttatatcttctttactcaatttatccatttgttcaaatagcttgatgtttaaatctaatagggtattactcattttttccctcctatattttcagtttcttctgcttcttttttctctttatagagtttaatagccatttcttttttactataatttctcatacctattgttttttctctgcttcttttcttataagcagcatcttgttttgatttttctctccaatattgcttctcacaagcagcagagcaatatttaactcttttatctttaacatctgttacacaaactcttgttccacagtgagcgcaaataaactcacgaggacagtcaacattatcataaaattgattaactcttattttcattattcctcctcacaaatctataaacttctagcttttcagcatatcttttaacctgtgtaaattcttctattgttaattcatcagctctaaactctaatattttgtttagagccttcttataaaatatttccatttcttctttattttttattgtcatagcctattcctcacatttgaacatcttcccgatgtcggcaatatgttcaacctttgtatttcctgactgtttcaaaaatagaaatagttatataatctaatttctaaatttcttcataaattattaaaactgcacaatctttaattccaccaaatttaatatcaacaagttttattttttgactttttaaaaatttatttatactattttctaaatcacctggattaaattctaaaattatttttactttcatttctcctccttaaaagcttgaaagtgtcctttatacactttcttcaattcctttacttgttctggacttaaatatattccagcaagatgatatttcttcataaaatcaattcttgaaatacagttatcggcttcgtcgtggtgctctctacataagcacatcaccctataatttagccctgtatctgatttatagcctgagcttccaactctatcaaaatgttgtaactctcctggtcttccacaaatacaacatattttctttttaagtgttacccatataaaagtatcttgataatcttctgcaaataaatctcttatttcttgccttaaaggtacttcccaataaatagccatttcaaatagccatttaacaaaatcattagcttgcttttgtgttagtgaattaagtgataaactgaatccaccattttgaattgctaggctctgtaatgctcttataacattgctagtcaattcatctactgttaggttatctttgtttattattgaagaaattaggaacgcctgagcatttttaacagtatcaaaaccatcatagattttagtaaactctctcttcataagttgctttgtgtatgcaagttctataaatgatggtcttgctcctgcttcgttaccttgccaaaagttagcaaagtcatcaagcaaccagtatataagtttttgtgtctgtcttgtgtatcctaatttctccatttaattctccttaatttctacttttttcttcaatgctcttttttatatttttaactaaatcaaaatcatctactacattacataccatctatcccatatcatttgtcccttttcttccatttctattcttaatttttcatcttttattgaattacaaatcctatttgtttcaacagcaaatcctatcatagttaaatgattttcaaggttataaggcttgttattgatatattcttctgcaattttgaaatattcataaagtaatactttttcaaaagggttatctattaaattttcaactatttcttttactctattctttacttcatcttttaagttttgctcttctttattcattcttttatactcctatttattttttaattctttatatatttttttaagttcttctaaactacaatccaataaactatttttaccaaacttagctgcaacatctaaaacttcattatataaatcttctgtattagcaagtttagttatttcttctattgcattcttttttctttctgcttcatctgttttctttttatcatctttaaattgtgccaaatcttctcctacataaagaggtaatcctattccaaacattgctatattttttgcaagacaacgcataatgttatcattaacttgtcttgaattaggcttagcaactgcattatgtttgttatccattattggtaaaaacatttccttagtttctccaaacattgttaccttagttttaactatgtgtacatctcctcttgaaaagaaaggcataccgtcattatcttgcactatttcataattcattgcagggtctttatccattgctaatttatatgcagtagcccaactcaaatatgaaagccctttataatcttgttctatgtgtgggttaatattaattccgtataattcatcaaatatttcttttttcatctttccctcctacatcaattcttctaatctatcaaataaataatcaatattattaattatccatttgattttgtactttattatttgccaaaaatttgcctttttaaattccatttttgccctccatttctatatatttttctattatttctactgcttccaccagtgttattccagctgggaaaggtattttattccagtatttttttaatgttttacaatgcattttctccctccttaaatctatttttttaattcttctaatacttttatagtttcaattatttttttgtttgcactttctaaatcaaggaaaatgtgttcattataatctgcttttttattttcagaccaaccagtacggtaaatttctatgctaataccattagcatttccgtaataactcataaaaaagctttttttaatttttctatttacttctaatcccaactccattatttttaatactttttctttcattccttttttcattttctcctcctatttcatccctttataaagtttatttagattttcaatagctacatcttttataggatgttcgctattttctaatttatttttagtttcctcataccaatttttagcttttaatttattaatgtaatagctttggtctattcctaaaaagtccatttgtgcttttgcttctaattcaacaagtccaaatattatttttgtttcttctgataaaaaatataaatctttcattttctcctcctatataaaatctcttattgataacccacgacttccgtatgggtcttctttttcatattcccaatcattcacgttcaacttatctatttctatttcattttctaaattgttcaatgcttcaacaaacttactgaaatcattgaatttataattaaatggataagtgttatcagaatgaacagctgttatctctacatctatataaccttgttcttctgtgttatcccaagttgctactattgaagtgtattcatcttctaaatatgctaggtctggtaacttgaaatagttgtctatttcgcttccatataaatcttcatattctgaatacataatccattgtcctgatgtaaattctagtgtgaagttttttaattttattttcatattttctccgtttctttaacgttttttacgttaaaattatttaaaaaaaattatttttctatcaatcttatatatcttataatttattataacgtttttaacgtgaaaagtcaataaaaaattttattttttacgttttttattttataatattgaaaagtaaaagaaaaggtggtgtactatggcagacttatctataactttaaaaaaattaagagagaaaaaagggataactcaacaagaattggtaaaactttcaggagtaggacaagggactattggagatattgaaagaggaaaaattaaaaaaagtagattagaaacacttgaaaagatagcaaaagctttaaagttagatgaagaagaaagaaaagaactgttttcagtgttagtaccaaaagatataggtataaagatacttcaaaatccactatataggcaattagacagtagaggcaaaagacaatttaatgatattatagaacagtcagcattaatgtttaatgatgaaactatatcagaagaagataaagaaagagttttaatggctattcaatcagcattttttattgcaaaagaaaaaaataagataaagaaataggtaggcgattaaatggatataaaattaaaagttttaaatttgattgtaaaatatggaactaaaaatccatttaaactagccaaaaaactaaatattgaagtattaattgaagatttaggagaggttaggggtttatttaaaagagttttaaggagaaaatttatatttataaattcaaaattgaatgagtttgacaagatgttagtttgctgccacgaactaggacatgctattttgcattcatcaagcgaacatcagtttttaatagataacacaagtttactgagaagaagtaaattagaagatgaagcaaatttatttgcaagttatttactaatcccagatgatgaagtatttgaggaatgtgagtttagagaaacagaaactaattttttaatgttagaagaaataaaaagattgagggggtaggaatataaattggagttgacacttaaaattatagaaattattgggacatttttagggttatggttaattttaaaacaattaaagttaaataaaaaagattatgattcaaaatttacctatcaaaaaagagaaaaggctgttgaattagcaagagaatttgaaaaatttattgaagatagtttattaatttttaatttaatatcaaaaactgaaattgttaattatatgcaaaaattagatttagataatggaaaaaattgtttaattaattttgacatacacgaattaaaaaaattctttaatgattatgaaagcaataaagacaaatataatatactgtcaaacatagaaaaaattgcaccacaagacatttatatgtttatgaaagattatgatgaagataaatatactcaacaaaaactagaatacttttattctaactcttttaaaatgtttgacctaaaaaaagaaattgaggacttaaaagataaagaattaaaaatgtatagattacaatataatacagatttaccattttttatgggtagtatgttcaatgatatatatttactgtttactgataatctaaataggttagaatatttttcaatgaattttattgccgatattgcagacgataatatcgtatattattcattacatcaggtatttttatcttatgtagagatatgttattttcatatagcagaaatgaattcaaaaggtgcaaaagataagtattacaccaatatgatagaattatataaaaaatggaaaaaaagatatttagaagccgtagaaaaagaaaataaagccaaagaaactataaataatgtagacataaatcatactaaaatataaaatttattgaaataaatatacatatatgatattatataaaaaagcataaaagcaaaggaggtataatatgtggcacgaagttattgatatgatgaaaggtacaggtaactatactccagaaaagttagcagctagaaatgagatggaaaaagaaagaagtaaaatgatgggtgaaatagaaaaaataaagaaagaaattaacaaagaaaaggaaaatgttaaagaggcataaagcctctttttgtttcttatagtaaaataaaacatttttttatttactcaaagaatattataaaaaataaactattaaatatttttgttcaattcttgataaactataaaatttatagtacaatagattataaatttattaagggaggagttttatgaacaaggagttattgaaagcaaaaatcagtgggaaaatttttattattccaggaatttttgcaggaatattttttttagaagcaattatatttttcaaagtaggagggtcttctgctggttttgtaccattgattataggattattaattgctgtaccagcattaattaagtattattgtacaaatttaatattgtatgataaaaaaatcagtggagaaagtggtttttttaaaaaacaaacattagatgcaccattagacaaaattaatgatatttatgttagtcaaggtatttttggaagaatactagggtatggaaatatagatatttcaacatcttctagtatatttaattttaaagggatagcaaattccgaatttttcaaaaataaagttttagagcaaattgaagtttataaaaaagaacagatagaaaaccaagctaagctaatggctgaagctatgaaaaatgcaaataaatagtttttaaaacaaaggataaaagccactttaaatagtggtttttattttgaatataatcacttgacattttacggattatacgttaaaatgtattcagaaattaaaaaggtggtgataaaatgactaaaacaataacaggagaagaaatttacttcaaaattgaaaaagctagattaagaaaaaacatatctaaaaagaaaatagctttatcaatcggaatgtctccaacaaatttttatgatactatgcgtttgttattaaaaggcaatattaggtataagagcattattaaaataacaaattttttaggaatagatttaggaataaagatataatttttttattctttttaaacgtattttacgataataataagagcaaaaacaaaaaagattaaagggctattctttaatctttaatgtctaaattttttaactttttataccttgcaaagttttttttaatctttgctcttaaattaactcttaaaatttctctcaaaaattaattataagagggattaaaaactcttagaaaaaaatagcctttctctttctatggggtatcctatcacttatgcagttttagttctgcaaatttaaagccaatagctgataggaaaaaagaataatagtgtccatttatacccgacttgtacggttgttattcaatttcaaaaagaactggcaaatttaaaagggcttttaacatcagcaccacctccaaattttgccataaggctactattattttagcataaattttagcttataaaaagaggagaaataaaaaaaatgaaaaaaattgattttgaaatgaaagtaaaaaaagagttaagaaagcaagggaaaacaataacaacattagcaaaagaattaggaatatcagtagcttattgttctgatgttattagaggaaataggcaaggtataaaagttaaagaaaaaataaaagaaatgttaaaaatctaaggctagtccttagacacatagccataagcatttttgccttagctttcaccccctcgagagttaggttcctcccttgtggctatgcgtgtaagaactaatcttacaaacatttgcaggtgtaaacaagctggtggattttataggataggaatatctgaattttaaagttagccgtaccgttgtaagtccgtcaatttacaactatatattttgtcgttcgcagttttatgatgtcaaaaccgaccatcttacatctttacctaacacagaaaaggcaagacctaatctgtggataattctaggcagctggtaaagatgtttgatgtaaaactttcaaattttttttaagacttttcaagataaatattaattttttctatatatatcaatgaaattattaagattttttcaagagaaattaaaaagtatttgataagtatctagtaactttctagtaagtatctagtaaatttattacttgaattagtggggtctatatgtcgctttggtaggctctatataggctctactaattgaattaataaaaggagaactaccaaggctctccaaatatacaggaggtaatgtaaatgaacaaaaagaaattttttttaaaagaatttttatcactagacaaagaacttatagaaaagttaggaattaatgaaacttatgtattaactattttaattgaggaacttaaaaaagcgacttttatgttaaatgattggtttccagttgcagaattatcaaaagaagcaaatggattaagtttaagggaacttgaaatggttgtgaatactctaatttctaataaaattatagaaaaaagttatattggagatatagaaaattctttttatagaatagattttaaagttctaaaaaaagttgtaggtgatgaataatgtctaatcaaagagattttaaaggtgtatggataccaaaagaaatatgggaaaataaagatttaacattacaagaaaaagtatttttaatagaaatagatagtttagacggagaagatggctgctatgccactaattcgcatttttctgaattttttagagtaacaaaaggtagatgttcacaggttatttcatcacttgaagaaaaaaagtttataactattcaatttattaaaaatgaaaaaaaacaaatagaaaaaagaattataagaattaataaaaataaaatgaatgaattaagaaaagaaactaaacagggtattaaggaaattaaagagggtattaaaaaaactaacgaccctattaaattttctaaacaggggtatttagaaaatgctaaaggtagtaatacagttgttagtaatacaattagtaatacagttaataaagaaaaatataaaaaagaaaaagctaaaaatgaacttgaaaactatatcactaacttagaagctgatgaagattataaagagcttttatttaagtatgtagaatatagaaaatctatcaaaaagccaataaaaacaatagttcctatacagaaaataattaaagacttccctaattggtttattttagatgaagctataaatattgctatggaaaaggaatggcaaggattagagcctgaatggatagcaaaatataagcaatctaagacttgcaataattatggcaataagatagctgaaagtaaggacacaagtcaatttttagtagatgatgattatatagagcaaatgaacaggaggtatggtttaaaaaatgactaaggaagaatttaatatcagttttaaaaaatttttagattattttccagttggagatatgacaaaagaaaaagcaaatatttactgtttggcattaagcaatttaacagctgaacaattagacaatgcttttatttctatggttagaaatagagtatataaaaatttcccacaagttgcagagattatacagtatgcaacacacacaacagaaaatgaacttgatgacagaatagttttggctaaacaaatgctaaaaaatactattgtcagatatggaagctatggcagtgtagagtttaaagacaaaggaatacacgcagttatagatgccttagatggttggcaaaaaatgtgttcaatgtcttctgatgagttggaaaaatttttaacttttgaatttactaagatttacaaagcatatactaggcataattacccagtaacacaatattatattggagttcacgacgcagcaaatggaacaaacaatataaatttaattgattattgtgatatgggaaaaggtttaaattcaacagttataaattacactaatagtaaaaaactattagaggatcaagacagagaaattaaaagattaaatgaaataatagaaaaacaaggaggaacaaatggtaaataaaaaaatgacaatgagagattattacagaggctttataacaaaagctaacaaagaggcaggagttacttttaatgctgctaaattaagtagcaaggaggaatgtgaggagtatcttttaaatttaatcagaaatctaagacataaaaagcaagataacaaggcttatatcaaagagatagatgatttaaaagaagaaatagagattttaaaaaaagataataataacttagctgctcaaaacagaaacagagattttttgtttaaattagctaatgaagctactggagactatttcaatgaaaagttaaagcatcatactacaaaaaagaaaataaaagaatacaagaaaataatttatggtttacttacaatcagcattatagaaactatctcaatttttgtactatcttggaagtgatgagatgaaacaaagatttgagataccatataagccagacagtatgaacacacactggagaatagcaaagaatggaggacaatacttatcaaaggctgggagagagttcagggacaatgtgcagcagtatataaaactctataagtataaaacttatgaaaaatctgtaaaagttaaattagacttgtattttgcagataaaagaacaagagatttagacaactattttaaagggatattagatagttttaagggctttctatatgtagatgataaacagatagataagatagaagcaacgaagcatacaggatctgggaagaactattttataatagaagttgaggaattaaatgagttttaaagaacacaacaatagagaagtgagtaaaaaattagctgaatatataacaggtacagaactaagaaaatatgtagctggtaaagttaaaaaatatctaaatatagaaaatccaactgtgtttgatggtgcagttggaagtggacaattagaacaatttgttaatccagctatattgtatggtgtagatgtacaagaaaactctattaattcagctagggaaaattttaaaaatacagaacttgaaattaaaagtttttttgaatatgaaaaagatgatttaattgtagattgtgttattatgaatccaccattctcaataaaatttaaagatttattagaaatagaacaaaagaatatacaaaaagactttgaatggaagaagtcaggggttatagatgatatatttgttttaaaatctcttaaatatacaaaaagatatggcttttatattttatttcctggtgtaggttatagaagaacggaggaacaatttagaaagctcataggaaataacttagctgagttaaataggattgataatgcattcactgatacaactatatctgtcttgtttatagttgtagataaagaaaaaactaataataaagtttttagagaaatctatgactgtaaattagataagcaaatttttgaagatgaatggattttagaagctgaatgcttttggcaacaaccacaagaggaacgagaagtagaagaaattgatataaatgctttaaataatcagacttctgaactttggataaatagtgttaaaaataacttagagttagatgtctttttagttaaagaatgtggagcaaatattgatgtaataggaaatataagaaaaataagagtaatatgtaatcaatatgaaaaggaaatgaaaggtaagaataaatgcaagagttcgatgactgtatcagagaagcaattgaaattattatctctgttcgaggcagtgcagaggtaagattatttgatatttttgacataaagtatatgagtaaaaaagatatttttacaaaaagagatataaatataattgggaaaccagctatattttatggagaaatttcaaaaaggtatgattgttttgccaatgaaataataagcaagatagataataaaatatatgaaaaagccacgaaaattaacaaaggacaaatattagtaaatttagaagattttgagtataaggacattggaagatgtgttttatatcaaaatgaagaaagtgcagcagtaaatggcaatgtgtcaatcttatcattaaaagatagctttaaagatattattgacttaaggtatatatcattctttctaaattataaagatacagttagaaattacacttatcaaaaatcaattggagaaaaagttaaaagactatctaaatcagattttgaaaatatgataatagaaatacccagtttgaaagttcaaaataaaattgtagataactttatagatttaaaaagacagtttgaagatgatattattgaaattaagaataaaataaaattaattgatggatattcaaaagtatatgttgaaagtatattaaattttaaaagaaataataatattgaggagttgaattaattgatttacagatgtaaaaattgtaataaatttatagccagtataaaaagcaaaaataatataaaaattaaatgtaagtcagttgagtatttagatgaaaataccttaaaaataaaatgcagatgtgagcatataaatattgtagaaattcaaaacaaaatcaaaacataactattgaatttactgtatatgtatgctataatacaaacaacaactaaaagaccaagtcgttaagtagataaatctattgacagctttataatataaagtagaaggacttagataacaaattaattaagatgtaaaaatcttattagttttttatttaagtcctttttgtttttcaggagaaaaaatgaaagaattgaaaattataaataaaaatatagatgagattaaagaatatgaaaacaatgcaaaggaacacccagaatggcaaattgaacagatagccaattctataaaggagtttggatttaatgacccaatagcaattaatgctgataatcaaattatagagggacatgggagattattagcagccaaacaattaggcttaatagaagtaccttgtattgttttaacagggcttacagaagctcaagaaagagcatacataatagttcacaataaaactacaatgaacacagattttgatttagagagattacagtatgagttgaatgctttaaaagtagaaggttttgatttaactttaactggttttagtaatgatgagatagacagacttttaaatcaagtagataacattgaagaaaatcaagaagagttaaaagaagattatgaagaaatagaagttgaaaagatagtaattaaaactggagattatatagaacttggaagacacagattattatgtggagattcaacaaatgaaaatgatgtaaaaaaacttttgagtggagaaaaagttaatatgatttttacagatccaccttacgggtataattatcaatcgaactctagaaaacaaaaaatggaaattttgttaaatgatgataagaaacttgattttttttcaatagctaaaaagtataataaaggatttttatttgtatgtgcttcttggaaaaatataaaagaatggattgaaatatttgagaaatatttcaaattaactaatctaattatttggaacaaaggtggaggaggcattggagatttagaacacacattttcaacagattatgaaatgatattagttgcttcgcaaggagaaaaattaacagggaaaagaattggtagtgtttgggatataaaaaaagatagtgggttaaagtatcttcatccaacacaaaaaccagtagaattgtcagcattagcgataaaatcaacaactaatgaaagagataaaattcttgatttatttggtggaagtggaagtacattaatagcttgtgagcaattaaatagaagtgcttatttaatggagctagaacctaaatgggtgcaaataattattgaaagatatttaaaattcacaaatgataaatttataaaaataaatggagaagaagttaattggatagaatacaaagtaggtgataacaattgctaaaagtaaatatgaaacagatgttaaaccaagacttatagagatagaggcttggaaaagagacggattaacagatgaacagatatgtaataacttaaatataagtatccaaacattttatacatataaaagcaaatatattgagttttttgaggctataaaaaaaggtaaagaagttgcagatatagaagtagagaacgctttatttaaaagagcaataggatataagtataaagaagttataaaagaagtaaaagagatagacggaaagaaaagtacttatataaaagaagtagtaaaagaaatacctggagatgtagcagctcaaatcttttggctaaaaaatagaaaatcaagtaaatggaaagataaacaagacatagatatagaggataacaatgtatctataactattaatggagtaaaaagaaatggaaattaatatacaagctaatgagcattttattgattatctaaataactgggataagaggttctattacatcgttggaggatatggaagcagtaaatcatatcatacagccttaaaattaatattaaaggcattgcaagagaaaagaagaatattagtagttagagcggtttataggactataaaagaaagttgcttttcattattaaaaggaattatcagtaattacagcttaaatagctttttcacatatacaacaaaccctttacacattagaggaaggaatgggagcgaatttatttttatgggacttgatgacgcagataaattaaagtctattgataatgtagatatgatttggattgaagagtgtcctgaaattagttacaacgcttttaatgaattgaatggaagattaagagcattaggtaaagacttacatatattcttaactaacaacccagttagtattaataattggacctatgaaagatttattaaaaaagctggaatagatgaagaagaactatatcaaaaaagaattatattaacagatgatacttattatcatcattcagtcgttgaggataatgcttttgttacagatgaatatatacaacaattaaagaattttgaaacctatgatattgaaagatacagaatagcatatcaaggaagatttggaatagttggagagagggtatttacaaatattcaaaaagccagtgataaagaagtacaagcaatagttaaagaattaagtaaatatggactaggtaatttatacgatggcttagattatggatttagtatttcatataatgcactcgttagaatggctctggatagggaaaataatgttttgtatgtttatgatgaattatataacaagaacttaattacaagtgaattaattaagtctatggattatatcaagcaaaagcatagagagattatagcagataatgcaagaccagaaacaacagaagaaataagaagagcaggatttaaaattataaactgtgaaaaaggtgcaggaagtgtattagatggattacagaaactaaaaagtttttataagattatagtttctgataaatgcaagaacacatatagagaacttactgaactatgtcacgaaaaagataagaatggaaattatttagaaaataaattcacaatagacccacatactgtggatgctatgaggtatgggctagaaaagtataaggctactgtgtttaaaagtggagagattaagaagccaataggagtttaaatggaaaaggaaagaatactaaaagcatataacgattatatacaaactgatattcataaaaactgtgaaaaatacaggaagttatcagatggaaaaagtgcagatgtattttttgcagatgtaagagcaagagtaaatttggaatatatgggaatag

SEQ ID NO: 3 - DNA, 130308 bp, Artificial sequence
  bacteriophage genomic nucleic acid sequence
ggaaacacctattcaagtttggtacactatgctttttcatattacattttattttattaacatacataaataataattattactaataatatttattatctttaattaataattattatttacattaattattattttttatagtagaataattttttaatttgctgggtgtctattattaaatttatatctattatttaaaacttaaaattaaattaattaaatacttatatcataaatttataagtgatatcatttaatcttttagtttggcacttgaaactaaaattaaaaatttaaaataacatacattaataaatataataaaatcaatatcttattatattcttaagattaaatttaattttataggtatacaaatacatacatatatatatatataattaatctatttgtttttggctgaaaataaaaatattaataatataattaaaataataatagtaattatagatttttaaaagtgccaaactaaaaaagattaactattaatttattataaaattaaattaattaaatactaagattattattttattaagcaccagcaaattaaaaaattattctactataaaaaataataattaatgtaaataataattattaattaaagataataaatattattagtaataattattatttatgtatgttaataaaataaaatgtaatatgaaaaagcatagtgtaccaaacttgaataggtgtttccctttgtgttcagaaagagtacagtgcctacctgaactcactcaccttccccactctctgtcataatctcgtacaatatctccaccacctgaacaataactaccatcatcccacaactcccctctcatatgtcattttttcatatccttgtgtattatatttgactttcattcgtttcactcattcaagtatctatcaaactattcaatttctccagcatctgtacttatttaatacacctactcccctactatcctctatactcatctatttactactattacaacctattttatctcctgtatcattattctacaccttatctgatagttttgtatatatctatgtatactactgttattttatccattttagtacataaatcctatattataacaccagcaacagtccattccaccaacattacaacaatgaacctctataatcaattttaacaagtgttattttattatttggtgctattatatctattatgtcaataaaatgatttaaaatgtctattaatttttagatgtcaattttatgcaagtttgtaacctctccagtattaattatataggattaaattagtatattaaattttactccaactaaaaagctagtcatttaagactagctttaatttttaatttatatctaaaatttcaatttctatactttctttaatcttagaatttttaatgctttcaaattcaatttctattttttcattttctaaatcataatagaaattaatatatttacttttattgaatttcttaaaaaattcttttaatttctctatatcctcagtatttacaattttaaagttgtaaatacattttttaaacctacttttaaccttattttcaaatgtcaaaacatcctcaaaaacctcaagtttactccatttactttcaattttcatataactttacctcctaaaaatttaatattttatactataattatactatatttttagtctaattgcaagaaaaattttacaatatttatataaattttttggctctccaataaaataaaaagctagtaaatactagcttttaaatattttatatatttaattttttgatgtaaaagtttaaaatttctacaccattaaaatctatataaattttatttttatttaaacttagattaaatctaagtttcttgttatctaaattttttaaaatacttaaaagagttataaattctcctaaatcagttaacttgcttaaaattctaaaacaagtcttataacctgcaccttttaaaactagcaattctccaataattgctatttcttgtcctctgtaatttacttcttttttcatattttttacctccataaattttaattttagatgtaataaacatctttatattatacttatactctttttatataacaagttacataaaagatattagctaagtctatttttaattgattttctccaaaatcgcttataaaaagcttatgtgttaaattatttttaagagtataatttaacaaactttttaactcttttacattatttttaagtgtaaaagaagtaatttgatttttacattttagacttaaaacatttcttttcaattctaaaatagtttttgatttcaatactattctcattttgacacctcctattttttacactttaaattatacatctttttttttaaaatgtcaataaaatttttactttttttgcataaattacatataaataattaataataactattaatagtataaatacaattttcttgaaccaaataaaaaaaatgatagcctttaagactaccattttttaataaagaatatgtaaagtgtaattactacacctacatatattccaatagcgttcattttttacctccatattttttttaatttaagaatataatgcaatatacaatttatactctttataactttttagaaacatattatttttatacatttttcttttaatgctttttaaaactccttttaattctttaattgtccacattgtaccattaataaacatttttgcctccttttaattatagaaataatatgttttattatttaaaaaatgaatttctagcattttttcagaaacttttagaacacaatctatcttaatttttctgaaatttaattcataaatagtgttattttttctatctataaacaagcttcttctgttcatattttcaatagtcttttcaaactctgaaaagtccatttttccaccattcaagcaatacacagtatatccttttctttcgttttcccttcttaatgcttgtaaactcacgtattcaagttgtttcataattttttacctccaaaatttttatatgaatgaactaaatcattcatttttttataatatacacctttttaaataaaatgtcaatacttttattaaataatttcataaaatttttaactctccatttttccagcatttactcttaataaaataacattttactataaaatttctataattttagttgcaactttttaaaaaattctaacatcttaaactatacatctttaaaattttactctaatctataatttacctgtatttaaaaactccaacctatccaatacctctatttttaactttaaataaacaagctatataattatataccttatatttaaaactcttaaaaagtacctcacaagccttttaaatagatatcctctttaacttctctattttagcctattccagcatcataaaaattacttaacttttatcaataataattattactaataaaaattattttttataattaataataaattattcaacttgtatcaataataattattttaaataattttattccctatatatatatatataatataaaagcgtcgatgctcgtagtccttccagctcctcactatataaaactcctgaatgtacctatatttaatatattaattagtgttcaactactaataaatacatcagttacatctttcatatattctacactaatataataattatactacacaatatacacttttctagttccagcatttaatttaactctttatctcttccagcaccagcacctataaactcattctttcccagaatgaaccttttaaaagccttataacctattttaacaagttctatcatataacttatataatttatatattaactgtataaaactttaaattccagcctctaaactatttaaaatagaaattacatctataactatactattaattttataaacttgttatgttctagcaccagtaacaactttaattataacttatatatcttaaatctattttaaagctattagagtatgttttaaagaattatgttaaatatataaattataagctaacatcttaaaacagtaaataacactatcctataacttttaaatttatattataactcttttcctgcaccaattaaaaaagacacccaaaacaattatggatgtcttaaatcttttatataaattttattataatactacaactaattatatatacaaacattaatgtatatttatattttcccacagttccaccttcagcattaattaatttactttcagctaacaaactgtaactattgtattattagactttaaaaatgtattatctaaatgtagtatatattctttttttccagtcttagtgctatattttatgtctatatgacctgatttttcaactatttcctttacatttaccttattttctgctaagaaatacaagtaattatttaaaattctttttgtattttttacacctctattatttaatattccagcaagtccaactaattctactcttttcataattcaatacctcctaaaatttttatatctgtatttatctattttccaatcctcaaaataccaatttatcataattggtaaaagggaataggtaaaaaggtaaacactataatttattaactattaataccagtgccaacgcactcggtaaaaataaacctctcaacaattcagaaaaccagatatttagtatacataaaagaattatgtatactataactatcatagttttaaagttaattttctgcattttctataccttttaaatttacaattacagaaaatccagctttataaatttcaataatttcagcttcgaattttataaaatcatcatcatctattaattttatagaatttttaaattcatataattttgtgtaatgtgatggaatttcgctctcagtataatcttttgtagtatatactttataagttccatcttctccaaaattacttatatatgttatctttccagcttctatttttaaacttgctatatctgaacctagcaagtttgtatatcttttataatcttttaaatttttttctaaattattataatttcttttaatcatttacttcaactcctaactcttccaaccattctctttgatagttttccaaactatctccaaaaatctcaaggaattcagttatgatttcatttttacaattcaaaatttctctttcaaatgtttttttcgaacaacttgcaaaatttccataactatctatataaaaatagtcatctaaccaatttcttatgcccccaaaaaaagttgctctaactaattcaattcctgattttcctgatacttctatcaattcttctaaatctttaaaagtataggttaaatcctcaaaacatccattataactatttacttctcttgctaaatctagcaatatttctgcttttctttccattttaaacctcctagaattttaacataattctttaattttgtcaaatttttcacaagtcatataaaactttttataatcttatgtgacttgtgaattttcttaatcttttagcacataaccttgtaaatcttggttatataccattttttcagatataaacttgtctaatttttttaaatctgctaaacaagattcatacttactaaaaaaaagatttctgtatttccccgtagtttttgaggcttgataatttgcacctatataaaccaattttccatactctaacacagctattatagaattatacgattgaaatataactcctttttctgtagcaatgacatattgatttttaacaccaaaatcgtctataactcttgtaaaatctctcataataaatcctccttaaaattttaaatatttgactttaacttacaaaaacattatagcatcttttaaaatttatgtcaatctttttttttaagattttataaatttcttctttgctacttgcttttctaagtgtttatatattaccacacttcttaaaaaatgtcaatacactttttataaaaattttgtaatttctccagaattaaccattttactcagtgtttcaacaataaaatatttttatagatgtaattagttcaaactttttaattaatctaataaactaaaattctataattgctattttaaagatatcagataccttttaaaactgttttatagatataagctatataatttatatacctaacttgtataaacctcttaaaagccattttaaatttaataaaaattatcggatatttttataacctgcttccagttccagtaataaaaaagactaattaaattgataattagtcttaaatagttttaaaaatgttttatacacttaattatatgtttaatttcatcattataagaaattacaagtcccatatttcctgagtaataacctatatccataatgctttcccctgttttttctacgtttaaacactcatctagagtgtctaaacagtcttttaatgtataatctttcattaaagtatagtaggtttttaattcttttttacttccatcttttccaataatatttttatagaaaataagattatattttttagtttctccaaaagtttctatcacatctatatcatagtaatttaatttataatttttaatttttaacataaaacttcactccttttaattttttataatgctacaacttcacaatttaagtcaattatattagtttttagtttatcactaaaaactttaaattctaaattgttttgattctctgtgatgtttaaaattgaattttgataacaatagtttttaaaatttcttataagctttttaactgctcctaagttagatactattttaaatcttttacctttcaaaactatgatattttctttcattttaatattttttatcttcatataacttcactcctttttaatttcgttgccttattatatcatatactaaagaatatgtcaataaaaaattttaaaaatattcataatttttaaaatacatcttaactatttataaattctattgttccagcatcaactcaaaaatcctataatatatatatatatataatagtatagcattttcttttaacctcttttaaattccagcatttaccagcattacaaaattattttaaaagtttataaaaaattcttgcaattttttaaataatatgctataatgtttttaacttaaaagagagcaaccttttaagcctgtacattagcaattaaataagatatcaattataattaaagttgctttcaagttaattataatcagtatcccgcatttaagattttagaaattgctttctgttaagagcattcattcaaaaaatcaaacattctattctaaaattgtaaatgtttataaatagcacataatgttctaaaagtaaacagttcaaaattagaacagactatcttaaatgcgaacacccagaaattggtacaggtgaccctcccctcccgtcctcatatagcttggaaaaagcccagcgaggtcgaggctcgtgaggtcgcgatggtcgaggctaaatcttaactttggtcgaggcattttcattagtcgtgatactaaatatcttatattaattactattatttcctttttataatgttaaacaaaatttcattttaacatcaaaagtctagggtacactcctttcttctacatacaaataaaatgtaccctagcaacctcttaataataactctaattcagtagagtttattatataaatagcttgacttctttaactgtcaagtatctaaaatttcttgttttcattattttgaacctcctttcaaaaataaatgaatatgaaaaggacacctattaattagatgtcctttttgttttaatcatttaacatttctagtatctctttatctgtcttttgtactccattacaaaatattctttgattagtgctacctctcaataatatctttaagttcttattctctacttcaaatttatctgtgattaaaaaatcaatcattgatatatctatccactgttccacttcttcttttgagtagcctgtccatacatatactgttttgttcgtattttgttttattgtatatataagatttattcctatttgtctatttttagggtgaaatacatctcctccaattatggatacattcttacatttagaattttctattatatgccatatatcttcataatatatttcttgtccaccatttatatcccaagtctgtttactgtaacaatgttcgcaataatggagagacacccctgaaagtatactgatgttgtgaacccagttaaactattaatactatcattatctacaatactagcaattctcatattatcatatccttttaattatttaaaaaatgtgagtatactcacataatatagtaaaatagtgtgattttactcacactattttaaggttgtaacttaactataatatttaattcttttttatacctcatactccctaaatttctatttctcaatttctgaaatttcaaattttgaaaatctgaaaatgggaataggggtaaagggtaatggggtatgtcctctaagggaatcggggttacttcttaggcaaccaacctttcattcctgcataaaatgctattataaagaatataaaccatactcctatctctattaacaatattgttcctattctatttatagtaaatatacctaatagatttaagaaccaaaagataaaagtaataggggttataatattaaatgcccatactcctataacaattataaacactattgcactaattataatttccaaaatacacctacctttgtaaaatcttgtaattcttccacagttatttgttcttttgttaaattgtattctcttataacatagtttataaaaggttctacattttctttataccaaaagattgtagccataggaacacctttaattttgttagcagtaagagttttaattctatcctcaaattcttcttttgctaattcttctctactcttttcaggttttggttgttcctttttcttatctcttttacctaaaataactcttccagcaatcataattgctattaaaaataccaatactaaaataaaaatttgcatacaatacctcctatatttcttttctaaaatgaccataaatgcttgtagtaatagtaaaatactttgttagttcttctaaagatatttcataaaacttatgtttagcccatttatctgttgtttctaaccaataagtaaatgttattttatctgatatactaatacttagccctgtaatatctaatactttgtataaatccgtagttttcataacatctttaaattcaatatttatgctatcatcataccctataaatatattacatacttttaaatattctccatctctaaataacatttctattacttccaaagcatttttgacatattgttcattacatttagtaaaatcaaatttatttacaatgtcaaataattctttgtgattttttctactcttactgtgtattttaaaattaaaatgtctatctaatacatcatatttctgtacatttactttactaatcatactatcaaccccttttctcttaatttaactattgtatgtgtttctattttactacatttcattaattgtttgatatctgtttttaaagtatatttcttaacacctgatacaacaattaattcaatagtatcctcaaactctgaaactctaattcctgaaatagccatataaggtaatattctagtatcttctgtaaagaaatacatactaaatccctcatcagtaaagtattgccaataaattggaattatattactatgaaacatcttttgtaatactttacaagtatttttaccacaagtatctgacatatttattacttttttattcactatttcatctacacaatcataataacctcttttatcttctgtttcccaaaaatgaaaatttacattatcttggtaattaattttaatatctgctttaattatcttaccaaagatatttttatctttttcacttctattttttatcttaaccataaaatcactccctataattttaattttgaacctgtgagataccctttaaaacgattttaaaagattagatgataaaaattatatatacctatgtcttttaaaatgctttaaacagcctctcacaaggtcatttattttatacacatattatagcattaattttatagtttgtcaagagaaaattttatttcattatatttgtatgaacaaatctatttgttatttctttcattctacctttaactgcttttgttatattgtagttagaaatatatccacagctccttctttgaactttcattgtcgttccatctgtatttccacaattaggacaagtatattgatgtctattcaaatcataattcatttctcctacatatccacatttataacatacatcgcttattgtattaatagcaaaatattgagttccacacttataagcatattgtattaattctataatagctttataattgtgtattttacccccattttctacataactaatatttccaccattggctaattgagtaaatttactttcaactcttattttatcaaaagggtctattggcaattcacttgaaaaatgaaaactatttgtataatattctctttttaataaccaatcaggcattacatcagcaaattgttctttatctttttcaaagaatgtacttatggatgcttcacttggtgtagaatacaaactaataggtaagttgagagattttttaagttcctctacattctttactaaacaattcattatttgcatacctaaatcataccctttatctgtggatatattttcttcattattcgttagcattctaacacaatcatctatacctaaatatccataagataaactaaatctatcacttcttaataatggttctatatcatcgttagggtttaatcttgccaatcctccgttcataaacaatattggtacttcttttggctttaaggttttcacttgattaaatctaaatataaaagcatctttcattaaagtttgactaacatcatttatcctatttaatagagtatttatatctcctttttcttttaaagtttctaaacataaatgaggtaaatttaaagtagtaaccccaaagtttgctctaccatattttacatatgtcccattttctttgtattcgtggtttactctgcttctgcatcccatacgagcataatatttattattgtcataatcagattttgagtacattagtaaatcagggtagtatgtttgtgctatacatttacttgcttctttaagtaaatagtaatatttatctccctcttttaaattataaccatctaccacatacatagaaattttaggaaatattgcaatagtggtttttttgccatctgttaaacctttttgtctaactttaaaataattactaataactctttcactttcccaagaggtaggaattgccatagttatagttacgaatggaacttgattggcattctgtagagaattacattgatactcaaaagtttgacaagcatcatatatatccttatctgtcttatttttagcttctgtgaactctctttcgtatatcttttctaactctttatttccactatctatcttgccataattatcctctaacgctaaaatacactcatctaagctagaattagatacattgtttattaatctatacacatcaataaagttctttctaaaattctttttagcataaatacttaataactcgttgaagtcagacagagatgtcccaccgtattgcgaattagatacactgaatactatttgcatcagaacagtacttgcgacttgaacagatttaggtgttcctatataagcgttagaatttttaaatccattttctaacatatcttttacattaggaatagaacaattagtactacgagtgtcaaaatctgagtcatgtaaatgtataatttttatactatgtgcttttgctaaatgttttggcaatatttgtaaaagtctatttctgtaaaactcccctgcaagtaaatctctttttacattaagtaattgagaatctttattagagttctcattactaccttgttttagtattctatccatatccgcataagttttttccaatttctgttctcttaatacagtccgtcttgttctatatctctcaaactctctcgctgtgattacgaggttatttttaactagggtatcaaatactaggtcttgtatttgctccactgtcataccctctctaatcactttacaaacaatttcagataattccttagcattaccttgttcttttgtttcagataaggctttactaattaccttttcaatcttttcaggattaaattcctgtaattctccatttcttttaactatttgcatttgtttctccttttgttaatataatatatctaacaatattggtatcattgtctaattcctctttattaaatgtatctgtttgccataaagacaaataacattcaatatcaggtactagatgtcttttacctattattgttaagttttctttttcgcttggttgttctactgtatatattgctatttcatacataattacctccttagataacaaaagagtgtcagaagtagacactctcatatttatatattaccttttttctgattttctaccatataatttattaatattagttattaattctatatatcttttagattgtctttcttcctctgttagtacatatctatcctctattttcttctgattaagattatagaaagttattaatatatgtgtcttagatactactaatagctttccattcatcaagagaaagtgatatacattcttaataggttcaagatataccttatatataggtgcataatataatgctctatactttcttttcctagaatgtttactatttaacagaataaagtttaaatccaatccttgtacttctgtcatattctctttttagtagtcttttttaactctttataaggtatgtttactttgtccttataaggttcaaaagacttcatattcttaactaatattaatggattattattaaagtctataacctcaaaagcaaaatctttgaatgtataataagctagtgtaggtttatcatccataacttgtaatacattctgtttattgattatcaactcttttggtttataagtagcagatatagatgtatgttgtttatcatcatatataattacatctactgattgtagtctacctttaataatttcactcttcttcatattggtattttttgtttggtggtcagtaactaaatactgtttgtaaatcttaatagattttaattcttctccttttgtatgtataatacattgttgtttaggtatccttaatcttcctctattaaaatttaagaatattgttgtttctagcataatatcatccccttttataatatttatcttctactaattgcataaagtctatatcttcttttaattcagatatattaatttttattaaattggctttaaccaaaacataaattgtatcttctaagaaagcaatagctctataatacactgtatcttctatttcataatacttagaaaagtgtaactcaattttcatatcctttaattctaaatcatatatagatggaaagtatacttgaatactttgtttatgtaataattctaatgttcttagaaatgtttgcattgttttctgtgatatattatgtaaatatacctcttgaccttcttcatctataaaatctaatatttttaatagattattatactttataaggtcaagattaaattcataagtatgttttccacaggttattgttatatttgtatttaattttagcatcttcactctacctcactttctatgtaaaataactttatctatataatagagctgttgtattccgttatctatcatagaacctacaaaacttaaataatggtcagaatctttacaagttattgtatattccaaataatcttttgtattaaattctattggatatttacataattttttaatatcatctttccaactagaataatcaaaataaacaccttttatttgttgttttaattttacccaatcagatttaaacatattaaatcacttccttacttgttttaaatatgcttcatacacagatacacattcattttcattgtcaatatctacaagaatttctaagtaccattcttccccatcatacttatatctgttttcttgtagtacccatacatctttttgtttgtgttctaatataacttcatattcagtggatacactacatacaatatcatcttgccaagtatctaaatcataactccacatctgtaattcttcttgtaatgcttcccatttatcaagcgtcatacactctaattcaggttgttttactattttatttttcatactatcactcctttgtacatcaatttttatttttataactcattatagcatattagttagatattgtcaagtgaatattttattagttgtacaataatttattttgtattggtatgtaaaagaaaaatagcactctgaaataggctagaaatggttagttgtggagtgctattttataaatgtttataaggttatttcttatgtttatataaacttgttagtctatccttttcttctgtaatttctctttctgttaatcctgtgatttccttagcttctttcatagtaattaacttgtgttttaataagacatcataccaaataataacttcccatctatcccaataacccccaccaactaatagaataggattaaaagatatatacatagtcttataaacatttttatctatgattactactcttaaaatatcattttctttcaatttaggtaataagttctgtcttagggtattataggaaacttctaatacttttgctaaatcttcataagttctacagtattgatttctattctttccatatttaattctaccatataaatctactttccaagagagtttagttatatatcctatttctgttgtagttagatttttagtatattgttccaataactcttcatttttactcatatagttataaggtggaactacttttctaggtagtttatactctttatctaattttaatttatcttctagtgttatatgttgtgttcctaaatctctaccatcttctgaatagtattttacagtaacgattttctcattacatccttttactcctctaataattttattcataataattgctttttcttgtgctaattccttattgttcatttaatcactcctttatttgtcattgattttgatataaaatataaaaagtcgtcaaattgaaaatagtaaattaccttgtatttatacataaattttatacattttattcttgatgattctcatatagagggctaatgttacccctctctcttttcgttacactcaaattcactctctcaacataaggggtttcgcccccttaacgacgaactacatcgctatcgctcgtaggaaaacagaatttacctatatttgaaaatgtcaactattttttataaagtaattataccacacaaatcttattttgtcaaggaaattcttgcataagagaaaaatatcaaaattttcctattatagagtgcaaaattgagtattttaatatagtgtaccttattactcataattaacttatttgcaagtaagaaaaatacattgatttccttttattacaaacaaaaattaatagtgagaaaatagttgagtagctattcaatcataaaatacttgactgaaaggaaagtcaatagtatcaatgaaatattaataatatttgtaatgattacaaagttgatagaaatacaagaaaggaatgtgattaagttacataagggataagtattgatatagcaaggaaaatgagaggtgtgtgtaaattcaaatacagtaatgaaaaaagaggggtgaagtcctcgcctcgacctgctgacccctcttattatacacacatataaaatatcctcccctatttctcctctttcatatatcttccctctccttatcctcatatcccactcatcttacttccctttttctctcttttattttcgttatcactcaaatatatgctatctctttcatactctcattctgtataactctcaatagtttcctattactcatattctactctgattgtatggtagctcctaattgtctacaagataaatcggctattcactctttccaatgttcttataaagtacctaagagagttgtagttctctaactttataatctattatagcattaaaaaagaaatatgtcaagttattttttcatattcctttttttttattttatttataatatattgtagtgtataaacttctagtttgaccttcaactacaagtcttgtagttatatctactatctctttcatctctttaatatatgcagttagactatcgctgtgtatatattctaaataagtgtatcgtaacgagtcatattcggatgtctttactattttttttttattatacaaaaataaatcataagatttaatctcatattctatcatagttataatacaattttcggtaatattattactaattacatagctatttgggtatactgataaataagcatttattgtttgttggtgtctttctgcaagaatagacatatcctcattatgaactctatcacttactactaatcttatctttttaatcataattactccattctatatatttaataactgatatttacttagagtagatacccaagcataaacataattttctcctatatctatatattctatatctttaataccttttagttctattttttgactaaacttaatttctacacctttctcttgatttatacatcctttattatagtaaattctattaatcttttatctactatcttacatatcttcaatatcttatctaacaatttacctcgaatattatatggtatattatttatttgtttgatattagaactcaatctaaaaatataggtatcattttcatcttttatattagtccaaaactcttttaatttaagtgctatttcttctgcttttttcttatctataaaataattacctaatttgtaagaattattatctatactataaaacatttctgtactcttttttattgttaggtcagaatctatatagtaatattcttgtccttttactctattataatttaattccttattaatttgtttaatcaaatttgttaattcttttaattgtattttattcaataattgactttctaaatatttaatatgagttgttttatctaagatataccaactattattaaaattatatacagcatatttatctgttttaacataatatattatatcttcctcttgttctacactatcaaaatttacttctagtgtaaaagcatattttccattaaataccttttgtgtttgtaatgttatctttttcataaatacctcctactaattatatttattttactcatctgttactgccaaaattaaaattaaaaataatattaaaagtaacattcatttcttcaatctaaatacttttctttctattttattacatatttattctctctttcatataatcttatttgtattttacaaccattctcttatactaatatttacacttgcattaggttcatctattactattagtaaattcttattttgaggagagtttcctccattatatctacctaacttgaactctaatattacattatatattaagttcacagtatttattattgacattttcttcttaccatctaataatactacatctccatcattcatagttattttatacttaagttcattcaatagtatagttttagtatttctctctccttgaatatctaataataacatataattactattttctactcttattgggtttattatttcctcaaaactgaaatcatctacaatatttattatttttatatctctcacattatcactctcctttatttattaaataatctactaaataacccaaatattcccatttcttttcttaattcctctttatttacttgtttagcttcttttaattgtatttcagcatatattttattatattcttctttactaattttcactaagtcataatcacaatatttatttaaacctttcatatatttaggatttatttcaacattaatacttattttcaaacttatagattgaataattaatttaactttaaaataattactaatataaatgtatcctaagtcataatctgcataatcatttctatttacactatgtaaatcatcaaaatctagtacatttaaagttatatgttcatctactgttggttgatacttttgtcttaactcatctaatttattatacatttcaacttttacttttgcaaatattttatttataggtctatccataatttcactctccttttaatttatttttaaatccctatgattatttctttcttcaggataatctaaaaatacaaatctaaatccagtattcttatcccatacaagaacaaaatcccttccaactatttttaaactagaatttatttcagttgtatgtttataattacactctttagccttcccataaaaggttcttctattcattcctatttcatccaaagttacaaaacaaatatcatctaacatacgatgattttcttctaaaatattatctaattcctcatataaatttttcattttatcctctcctttatatttgatatcttattatatcatacttattttattatgtcaatacttgtctattaatattttctctcaacctagtctactcaacattctaccattggtatctttttgatacctactttctctttatataccaatataaaaatgaagcgattagagacgttttaaggtgcctctaaaatgttagctatataattatatacctcactcgttttaaactcgttaaacaagctctcataaggttaaataaaattcagtaaatattagtatttttactttatatgaaaaaaagagatgtatttacatctctcttctctttatttctttatctttgcttttatcttgttatatatttctaccatcttattctttattggtgttctaaaatatgataatagtaatatgataactaagattagtatgattagtaatctcatattgggtttacctcctttttgtgttgggttattgggggattagttacttctagcttgaacataaataattccgttttgtaaaattattcttctattagaggttgattctgtagtaccattataaagaataaatccttgtcctccgaataattgtaatgcaccaattattttagtattaccatctattacaatgttttctcctctaactttaaaatctccattaactacggtattaccatttaaagttatatctcctgattctaccttatctttaactttattagctgtagtgtcatctgtataattagttgctaattcccaatcagattgattaaaattatctgttttatttctgttagttttacacatatataattgtttgtcattaacccaaaaatcccctttattataaggaggaattggagtacttgtatatatagtagatttattcttagctaaattcctagcaattctgtcttctgctgttgattgtatgggtttccattgagtgccatcccatctccacatagtattgtcgtcagatttataccataaatcccctgtatgtgctttttgcccttgttgtgttgtccaatttactgcggggtcattaggttgataccaagattgtattttaccgtcagtttgtttacctagtgtttcatctacaagtttctttattccatctattctagcttttacatcttttatagcttcatcttttgctttatcagaggatttttgtataatttcagtcaataaatcattatatttttcatagtaatttacaaatactcttctaaattcgtcagatactacaggagaagtaacattcatatctgctaataaggggttacagaagtctattactttttgttgtaaagtatctaatactaacatcttagggcttaattcaggaaacacatcagctttattttttaaaatagaatgattagcttttaatatttctacttcttttttcaaagattgtttttccataggagtaattttattatctccacctatattttctatattagttatagtatcagatacatatttatttaatgatttagatatgttaatactgtcttgaacataggaattaatattattaaattgactatcccaatttccattatgatagaaatagataatataattattatcagtatctacccataaatccccagtttttgcagtaccttttggataactgtcaacaaaatgaattttattattgttttcaacttctaatattctgttccctattacttcagaatttccattattattcttatatatctttttatctgttacattaataaatatatctttatttctccaaacagtaggtgtagattgccctataaatacatatcttccatttagggtagaaataatataaggctctctaatatcctcccatctattatgtctaaaagatttcctaattaatcctgtattaggattaaaccatatatctccttcttttaattgataattaaaatcagatacaggttcatttacttgatgaaatactttttgtcctgttttagcaaatgtaggtgcagtataaaatgacacccaagtattattctttcttatgtatatattgttgttgtcatctgtgtccacccaaaaatcattatcttgaatacctatgacttgaggttcattagagtatataatcttagaaaactctaagttattctctaaagctttatcccttgcagaaatccagtttgcaccatcataaatgtaaggcttattgccatttgcagtatcataccaaatatctcctttctttaatcttgtagtagaattatttaaaggtttactgctatctctaaatactctattattttgtaaagcattataaaggtcattatcagctgttttattggcttctcctacttggaaattacctctaaaagtagctccgttgaccatatcatagtgaaaatagtttttattatctcctatatgtattcttctaccataaagagtaccatctacatctgtgtgtattgttatggctaagaattttaccttttgaccagctaatatttcattataatttgtagcatacatctgtctttttctaatcatagcacgatattgtaaatctgaatttactaatatcatttctccattaatatctactacaaattctacacctttaccaaataatttatccttatattctgcttgtttagtgccgtcgaaccctttaaaccaaatataaccattattatatttctctactattgcagaaaactctttttcatctatcttagatacccatacttgacctacatcatcatctttagttgagttagattgtccattacctaaattttctgtacctgtatttgagtatttaggtatattcaaaggtttatattctaacacattcttaatatctaatgaataaggtttagtattctttttatttacatttaagcagtctaattctacattattagtatcagaactaattttaacagataacactatccatttataagtatctttatttatattagtaaatatcgggtcgtcaatagttataatatctaaaggctctatatgaagtgcattaaataattttaaaggtaatttatatttagtagtttcgttagatgtagcattgtaattatttaatacataacctaacagtttttctatctctgtcttttctaacaatccttgactacctaaatcatattttttctcttcatataaagattttgaactttctcctattttagttctatcactagacactcctacaaaagattgcttatgttgtataataggattacctttaatatataattcttgtagaaatacaacactttcattaggaaacttagtaaacttatatttcttaccatagtttctcttagcaaaaggactatctactaaaatataatgatgtgtttcacttccaactgtttctacatatttacctttaattgtccatctgataccttttaatttattattatattcttctaattcttgttgtgtagggttatcttcaggtttatttactatgagtacatctcctatatgatatagactaatatcagatactcttagaaattgattaccttttctatctatttcttggtctatgaataattgagttttgggtatatttcttgtattcattaatataagagtggcatctatatttttatcactgtttaaattttcttctactgttagttgaatatcagaattatcaaaggtagtgtactctgctacccaaccttcttcaaatttcttttctgtaatatgattagacaacatatatataggtggatatgtagtagaactgtgagattgagaatattccatattatatttaaggttttgattatcccaaactccaaatatcttatttatatcctctactgtaccactataactacctactttaagattactagcactaccaaaagtaatatctattgtttctctatgtataggctctccgtctacttttggtaatatagggtaatctaatgcaaattctctcgattgtccacctatatttctattaaatctaaatatgtcaggtaattcaaaccttacataatataaatccataggtttagatactgtatttaataaattattaatatatttttctttaccttgaacaagcaatctatagtctttatcccaagcaaagaatgttaatttaactttattaggtgcttctttaataataactctaccataaaattcagtataaggattaaaagtgcatttagctagtacataatctcctatggtacaacttgtaaataaatcattattaggtattgttatttctaaaggatagtaagtttgtccactaaaacctaacatttcattagacataaaagcatttggtattttctttttaaaatttacatagcatctatctaggtcatcaaaattatacataggtagattagaatagatatctccttttacggtgttaaatataagtttattatcatcatttaccataatatcacttatattagtactaaaatggtcatctacttgtaaattatctataaaataatcagtaaatatctttatccgttcaaatttatcaaaagtaaatctaatagcactatgtttacaataggcttttaataactcattaacctttttaaaagattttaaagctattctatttactgttatagctttattagggtctactccagtaacatagtatacctcattgtcttttaatttaaaaacagttttaaagaactcttttggttgcatattctttaaaacttgaatactagatacatcttggttataccatttatataaataactttttaatgctattgtaattctttttatttctgatgatgttccagtagaaaaacttatcttttctactacacttaaattcttaagtatcatatcattattttgtcctttaaagaaatatacaatagttttcttattacgaacttgatactcttgtaaagtagataaaggactccatctttgaaagttatctgtgaatactaaactaccattagataaatctactgaaaataaatctgaacttgtattagtagcactgtctgtgaatgaataagagagtacatctgaaccttgattttcataggttaatatagttactaatctacaatgtttacctatcaaagtttcagttgcttgtgtgtgaaattgttgtctaattacatttatatgacaactatctttttgtttaccgtctattgtatcttttgtagtattatctatactaaatatcttaactatttcatctccaactactaaatattggttcttatactgtgttacaggctcttcaagtctagtaggtataactaatgtgtctgtacctataagagagtgtataacagtgtctaatggctttattttaatatttatattagataatgctataagattatttagagttatgtcattactttctgctaattttctattcaatcttaacctctttccattaaaactatatccccagtaaaatatgttacctcattattttcaggttcagcaagagtattttgatttaatcttaactcatctccgtcaataaataaattagtgaatattttattggtatttaagtcagtcaatattattccttcgttagcataattaaatatgtctactaagatattatattgactttctaatatttttgctattgttattgttatatattttctattcgctactttctcgttgattattctacctgttattgtagtagtttttttcgcatttctgtgagtgtatgctatattatgtgtaccttcacaataacagataaattcatcattgagagttttaatctcatacattcttaaacccccaatttatgttaccgtagattcaatctaggtaaagtaaatttcttattttaaaataaactttgtgtttttattccttgtacttgttctttatctaaatatccccactcaattaacttctttattaaccaatttaatcctttttgagatattagaggctgaaaagctaacttatctgtcttttctacatagatttccttaaatttcaaatatcctctatctacatattgttgataaggttgatttcttttatctaaaatatctttatctcttaataaagctaataaaatatttctaccaaatcctaaatcttctaaaagtttagcaactgttttaaaatctatgtattttttattatctgctactttatcatagaatagtgctttttgttcattaggttttacatatttatcataaaatacaccaaagtattctattctttcttgttgattattagaagttactatcttacctattaaagcatctctttgagataattcatattctaactctgcaactctattttccaaagcattgatatatttaatcatagcttttctaacatatttagattctctacttaatatttgttttgcttggtctaaggtaagaacaaacattgttctaatttctccttttttgtccttatacttaacctccaaaattttttggtcgttaatttcttcttcaaattcatcacgaattatggctaataatgtgtcgtgtcttaattctgtatatttaccatttttcttttctacttttccaagagataatcctttttcaagtttataattatactcttgttctctaaatacattaatttccttaactaactctaaactagatatagtttcttttcctttattttgtaatacttttaattttgtgttcattacacaccacttccttttataattttatttagttagtttcctaacttttatttcattatatcataaaagaagtgttttgtcaagtgtaattttaaccataaattccgttattataagtaccactattataaggtctattagttaattgaggtcttgttccaaaatgaatttcatatctaccatcgcattgtatctctacttctactgtatttttttcttttgcatagtcttttttgtaaccactaactactttacaattaggatatatttccatagtttttgtatttggatggctaactataattctaaatactttacctaataaatcattaccataatctacaaagttctcccctacaaagtatgaaagagttaatttaggtatcatattagttctgattatttcttttcttctttcattaccaaaagtttcattagttatgtcctcgtcatactttaaactctcataattaatatgttctctaatattattagttataaaatagctttcatctctgaatgtagtagaattaaagaactctttaacacttaaataatgtaattctattggtgtagtaatattttggtcagtcttatacacaaccatatttatagtattatatactaaatctagtttatttattagtttttgagatagagttattgtttgtccactgatagacaattcactctctttcactcttaaattgtttatgtagagagtaaataaagaataattattaggtattgttattgtatagtctgaatgtaatgtttgattataaagagttttagcacctattttatacataagttgtttattccataccattttataagaagtattactagaggtactgttgataagcatatatttatctttatctgttgtatatattaataaataatcacttgttacactgataacactgtcaatttttacatctcctacattaattttactcattaaattgttattattctcatctttttctaatacaccattttgatttatagtaggggtaatatgtattttagttatcttatatggctctatataaagagattgtgctgtaagattttcaggtgtacctgttatatcactcatatctttgctccttgttataatagggtataaagcctttaaatatccttatacccttagttattatattaatttctttaaatctattcctttatctgtgtttaaaacttctattgtatcattaatagtagcttgaacaaattgttttacttctgcttgtggtattactataccagcatttacttgacctgtaatatagaaattattaattacggtttgtgatgtacccgtttcatatttaatttcgttattattgttttgataattaatatctttattgaaattaaacatatctcttattgctgtaagttttcttctttcagtttcaagttgtaacccagtagacattgccatttgagctattttagataaatcatttaagttcatattactccttaaagttttatctaattgttcagacaattcagtaagtttattactcataaatttatctattaatctctttgacatttcttctccaatagtattacctacaagagtacctacttgggttaaagcactattcatttcagtagattgaataccttgtttaaagttttcaaacatagattgttgtgtcttagtcaataggtttaaagatgacatttcagaaaaagacatacctttttctcttgctactttttgtaaaccagctaaagcagaactaaaagtgtctgttttctcttttgcctctctaagtaaatctataacattagagaatggttttctcatttcactagcaatcttatcccaagtcaaatctctaccttgtttttttagattaaataataaatctccaatattcttaaattgtagttctaatctcttagaagagttagagaatacagtatcaaaatatacttgtgacatattatttaacaatgcttgaatataaggtttcattgaaccaacaaaagattcccccgctgttttaccactatctttccattgtgttaagaaatcttttctgacatcagacataatagtgactaacacagacatttgtttagctaattctcttatttgttgagttataccctcagttattgttactccagcatccttatatatttgagtaagatttttaactaaatcttcttgttttgatacactaaatccttgaaatgcctcaaaagttgtcctgtatgcaaacttatttatcatttctttaagatttatcatagaagtaacataattatctactaccttagcataatctttaaaattattttctaatcctttactatatccttttaaccatttagaaaaatcctctaattgtttgactgacatatcaagaatactaccattaaaaccatactctttcaataatccttgagtagataattgattatttttcaaccaagttacagtagacttacctgtaaaccaatttcctcttgttttgctttcttgtgttaaataactaacattaccaaaatctctgtttacattaattactccatataatttttctaaaccaccagtaattctagctatattatcaatcgtaggcatattagagaaaatgctaatcatagattgatttaagttaagtaaattagtattaagactttctaatctattagcaactatttgtaattgtctagtgttttcattatattgatttctagctttttcagattttttatcagcttctgcttgtctattcttattctttctaccaaatataccacctagtaaagataatcctgtacttgtaagcataccgcctacacctgacatacctaataatcctgaacctaatgcacctaaactaccaaataattgagaagtagagttgtttaagcctaaagcacttgttaatgcttgtcctacttgagcatctgcattagctctaccaaataagtctttcattttagacataaattgttgtaaagtaggggataagaatttcataccttgttcagacatagaattagcataattacttaatccctcaaataaaccaccaaaaccagcaccaaatttacctgttccactatttttcataaaattagccatttgagaaaaacctttttgtgctacatcattcttggcttttattaactctaattcttcttttgttttttgtacttgtttttcttgtaataacttaagtttttctctaactttaagttcagtatctaattttaatattttggtttcaagttctttttgttcatcttgtgttaaagtaagcccttttgcttgtttatctcgtagttcttttaatcttttttctatttcttttgtatcttcaaaatctaatttagcatatatagttaaatcctgtttattaattacatctgaattaataacattattgactacatcttgcatatctcttgataataaagataaattaagatttttaagtttagatttaatatcctctatttttaagctagttaattcaatagtatcagctaaagtagaaaaataatcttcatcagatagtttatttaaagaataaaattcctttttataggaaataaggctatctattgcttcatattgcttgtctttaacactttctattgctttttccaataaagataaagaattaatagcaaagttatcaaatttattcatataagacatataactatcatacaatttagataactcttgttgttcctctttaatggcttgtccattctttccactaagagtacccatagctgttatttcttctattctagctttaattctctccataaaggctttatctgtttcgttagcccctttttgtatatacttttgattctctattgataatctttcttttgtagctttaagagtatctaattcaagtttaagtgattgttgtttgttaaggtattgttgatattctttttctaatccttctttacctataagataaatagcttgttctaaagctaaacttctttcttgaagtttaacatattccatcttatattcagtttctttatgtccttgtttcttatgcccagttttagcattctttttgttttcttcttcttgtatagatatagcataagcctttttataagtttcttcttcatgtctagcttcatttaattccttagcatattttattctattctctacatcttttttttctaatttagataaattatactctgctcttgctctcttttccatacgaggttgcatttccaaaccatatctttctgcctcttgtagagtatcataatttacttttttattctttttattagcctttacaaactttaaggcttcatcaaaactaatttttccgtgttcttgtatataagcattttctgcttctttatcttttatagttttttctaatatagtttttgttacttgtaaatgtatttgatggaatcctacagcttgttgtaaggcaatatttatggcttctaattgttgtttagcttcatctaactcgtgtgtatctaaattaagattatatttttcattaaagtgttttctaaatatattagcaacttctgtagcatttttgcttacatcataaagtttattagtaattgggtcaaaatacttacctgattttgctaaatcttcatttagtgtatttacaaataattctagtgctttatcattacctcttaaagcatcttgataatctccaatttccttagataagtcttgcattttattagtatattctgttaattgtgtatctgatttttctaattgttcactcattttttcaaaatcagctttacctgtagttgcaaattgagatattatctttgtagcagtagttacatctaatatagcactatcattcaaatcactatactctttttgaagtttttttacaaggtcagtttcttcactaagtaaggcttttctataatttattgcaatttttacatttttagcttctaaatcagaggaaaatctccaatcgtgtgaatccacataagagttatcttctctactttttatagcaatattatattgtctatctatttcttctaaaatacttaattgtttttccttagcttttgcaatatcttctttaaacttatttgtatctacttctaagtctgaagctaattttattttcattttatattcagatgaattttttaaagcttcttgttgtttatccaataattcttttattttcttttgtaaatcattttctgaaaaagctaaatctacaagagttttaaattcaaaagtatattcggtatctttatctaaattaattttatccatattagcttttataccagaaattttactattaatggcttcaaaagtttgaatagtttttaaattagactgaataaactcctcttgatttttctttattttgtaatatataaaagaaatacttgtaattgctattcctacccaagatacccaactagatataaaggattttaaactatctcctacgaaatttaaagcatctctccagccttttatgtgtagatgaaaatagtgatttaattgaccaaaagctataccagtagttaataaagttttacctaaaaaaccaacagttccagcaatttttgcaaaaaaaccagcaatctcatctaagtggctttcggggttattggctactaattgattaaaagcatagactatacctgttaaagcatctccaagataatacataccatcagcacttatatgctctaagttttgtttaaatagttttaattgattattcatagtaaacatttgtgcttcaaaatctgccacataatctttaccttgtgtaatatttttaactaaattatttatatctccatttacttgacctaataatacttctaagtcaagtgcatgtctttgagtaaacattttttgtaaagtttgacttgttaaaacaccttctacctttaacttagacattaattctatagctaaaggtaaatctttctttgctaattgtgaaagtacatcagcatttaatacatttgagtttgtacctagtgctttcatatacttatcatctaatttataatcttttacatttgtattaaaaagattttttgctgtcttttccatcgttactaaacgagtgaataagacttttattttagttccagctatgtcaaatactctatttctggtagtttacttacatcacattctgttgctaatacttcttttatactataacctttagattttccttgtgtttttattgcatagactatagaagtatttgttactcctataaaatatgcacaagataatttattattaaaataataaacttcttctccttttgatatttctactaaatgaactttaagtatattatcaaaagtttctccaaataaataaataaaaccatcaaatgtagaattaaaatttgcttttccattacttagtaaggctcttgagttttttcttgctactcctctaattttttcccaattttccttattttctttagaaaattgttttttatcaaaaatttgtaacaatctaccaaacttatcatatctagcaattttagtatttctatcatttaacatagacttagtgggttgagtttctgtttcaaaataataaatataattagttaatatatattttgttaataaacttctccaatcttttttagttgttttatttagaaaatctggaaggagtatcataaataatttctaaatctttagtataaatattataaccaaatattttacaatttttattcaatatttgattttctacacttataaatttattaggtgttattcctattttatattgtttatccctataagttacaatcttttcctcccaaatataatcacttatatgcccagctgatgttcctaattctctagctgtgtcttcataactatcaaatgaatctagttcctctaatgtatctatatcatatagatatactttattctttttatgtgggaatttatttgtaggattttcattataacataaatctgtatttagatattcggctattaatcttttttctatttcatctttatgttttttatttacttttttcacaataataaattcaaaataatcaatacctaactcattaaaatctttttgtaattgtttatttatatgtgtattcttttctagctgacctctatgttcactccatctacgaacagggtcaactgtactaccaatgtaaaactttccagattgtttattgacaatcttataaatatatgcactcatataagtacctccttaattttggttacacttattatataacataatttaaaaattgtcaagagtattttatggactatatcttctcccaaaagtatatttggggcaaggttattcaatttaagggaatttcacccgcttaaatagtttaatatttaagccttactcctattgctatatttataatgcgtctagcctatgggatagcctctacacctctcttagattaaagagttcggctcggtattaccaatctaacctaataaatatatttaggttaataggttctcttacgaagtgtattcgtttattctataaatagaattaaagctaacatcgtttattagcaatcttatctaacttctaccgataacaaaattaattatacctaaattaatagttttccttgtgattgacacattttacaatgtgaaagagcctagaataaaatatgtagtatatttactcaactaactctgacgctgattttccaagattattcattactccaagccctacagctcctacttctagtaattctttcttataagcttctaaactttccccagttttattactagaaagagcaatcgctcctaaagcaccagccacttggttcatacctccactgatactttccatactagaagctgtttgtattgcagtagagtgtagaatatttaatactttttctgtattttctgaattaatacctaaagataccattacctttgtaactgttttagccgtatgttctaaatcttccccagttgcaacggctaattttgctgtttctctagtaatttccatagcttctttataacttcttcctgttcttactaaggcatctgctgttttaactaactcatttgcagttttaggtatttgagaagatagatttagaaattcgtgcatactatccccaaaggaacttataccttttcctgtcgctatgtttaaattcgtaacactagcttctaatttagtaaacatatctactttactaaataaacttaataaagattgataactataacctaatgcttctatacttattcttaattgaataaatttagttaatacatcatcttttggagcttttaatccttcttttgaagcattctttaaattatagtactctcttgataaagttgctactgcttttgttaaactaattattttagtttcagtagtagaagtattaataaaatttaaaccatctttattaattttacttacttcttcttgaatagctttcaaacccgataaaacaactttaagtccattcttaaccttatcagtctttaactctaattcaataaaggtctgtctacctgccattttacctccttatttattttctttccgtaaattttcatattgtaatttttctacttcatatttcctagataaataagctcttttagtttctatctctctaaaactaaattcactcatacatttacctatattttctttaaatattacattattaccaaattcagcacacacttgtatagacataaaggcttcagatagatgttctgtcttttttccattttccatttcactatgtaatatatttagaaattccttaattaacttattctgttcatctaatatatactctctgatgtcatacaattctatttcagttaattctaatttagtaataagtttacctaactcatatatatcttttactctatatttgtcatatattaagttatcttgtataaattctatgtcttttaattcctctacatctgatttatctataaggaataaatctatgtctataaaggttataatatcatctataatgtttttaagttttttatactctaatagttgtttatactctctacttaattgtgtttcatttacagatttatctttaatatcctttatatgaaataaaaagggaagagttatatccccatttagtttaaactctcccctccttataatttctaatttgttgaatatactcattttgttttagcctttgtagtaaccttttttgaggttttattttcttctttgactaatttatcctcttttgtttcagaactttttaaatcagcctctaaggcttttatttctttttgtcttttctctaaatctttttgtagattaagtaaagtttcttctctcttttcttttggtaaactatccatcatagaccaaaatttaaaagtttccatttctcttgttaaatcttttatatctgtaattttagcttttaacaatgcaaccagtttaactaataaatctatcatttcaggttgagataatacatcacaaaatatatttaaagcaccttgataatctccttgttctaaacctaagtcttgccataaagagatttctttgccctcttcatctttaaagacacaatcaaaatctatatgtaaaatacagtctaatagttttgtttctaattctctctttttaaatttatctctattcttagtatcatctataaccattattaaagctgtatcataagctaagtcaggtctttcttctctatatactcttttagtttcttctgataatagtctgaaaggtatagttttaatacaatctttcatttctatatcaggtaattttatacctgcttttaaacttaaaacttcattgaaaggtttaattttgaaaggtaactctaagccttttaaattttcgtgtataatacctaaatctaccactattgttttattattgctttctcttatttcttttaatctttttgctaatttcatactctaattttctcctcttttataaaaatataggataggataattaaataccctatccttagttacttgttttatactaaatctattgattgataagcattcatatcttccatatttctgtcatatacaaatactttacaaacatattgtttatttccttgtcctaatgcaaaatttacagccttacctgttaaacctgttccgtctgtggtatctacaacaacaataccgttttggtcagtgaaagttgtcccagataaagatattctttttgctttaattcttgtattaggtttaaatttaccttttaatacaggtgttcccccattatctaatgtaatatcccctgttgctgatattttacataagataggtttagttattccaggaatagttgatgctgttgagtttcctgctacaataccgtctacgactatttcatctaatacttcatctttatctaatttagatgtttcacctacttcaattaaatagtcgtttctttcccacacatctgacaatctgtttccattgaatgtataagtatttacatccccttcatcttttgtcataccagtatttgctactagaggcattatcataacgaaagttttgtttgatactactctaaattccatacatatagttttattaaatgtatcgtaagcatttctgaatgtattttttcttgttgctattttacctgtttcagggtcaacagctcctgttactttaatttcatctgcttctaatccaaatactttcttaaaaggtaatcctatttcattaggttttgctcttgctgttaaagttttcatagtaccattagtacctacgattgtaatgatttcatctgcacctacataaaaactttctcctttaaggacagcattaagtacagaacgagaaacaccaaaaggtgcattatttcttacaaagttcaaatcttctttgaattgcatagaaatttcagcttgtgggtcttcttcatccaagatagtaggagcaacatttgtaccattactagcttttactgagttaataccatagtttcctgattgtaagttatctgttgataatccagtaactggttctttcattgttaaaagtatagaatatattgaaacagcttttgttttatttgaatatcctaatgcagagataagcacttcggtacttgttctaccgacagtttgttctcccccaatatctataactgttctagccaattattaatcctcctaatttatatattattaaatgtttttattataatatagaatgttctataaacattatctttattttctacaaatagagaagaagtaacattattactaataaaaacatatttatttctaattaatttattgttctctttatcatatacttgtaatgtatttctttttctatataaaaatagttctacataactttgaatttcattatatagtttaccttgttcatctgacttaaaagctacaccaaaatctattctcttgaatgtattgaatgtattacctgattgttctcttgaataagaataatttgcttttactaatattggttgtttttgttctagtgtaaaacttcttttaggtaatttatttgtcgtatctaattgtaaaattattttatcggaaattactacattaagtatagtaataaatttatttccatatttgaatgttttatttaaaaacatatctgttgttgcttttatattattatctatttcaactattatttcatcattgttttgttctataatcttaaactttataggttcttgaattagtacatcatctgtgaaataataaggtaaattatcttttattgcttgtttattcaaatgatacaaaagtgtatttatttctatcatactaccacactacttctagttattttattattttctataaaaaacactatcttatctaccaaactatttataacatcttccatatctttatctgctttactttctaataaatctgtaacataatctactatgaaaggttgtaacttagggtcaaatcctcttgggtgttttgttgagggcatactagggttagtatttaacatatcgaaagcttctgaatctatatttaattgatatctccctttagatttagaaaatgaaattgtatctcctttttgcattctcttttgtaaatctttccagtggtcataagggtctatatagagtttagcagatagtttattatacccttcttggtttaatatacctctaaataagtctcttgtaaatctagtatcataagctgttgcttctgctattttataaatgtaaattgccataatatcattttgatatgtttctaaatctttatcaaaattaatcatttttgtatttagttcatttataaattgacttaattcaactttagtattagacatctactaacctaccatatatctctcttgaaatgtcatatgagccattaggagctattttatacacaatataaacattgcccttataatttatcttataatttgtaaaatcgtttatagggcactgtgataagctctcatcaagtaaatttttagcttgtttaagttcagatactaggatatgaaaagataactctaatttatgattattattactttcttctacatattgttcttttgatttagccacagtacattgtatttcatattcctctaagccattattagattgaatataacaataatcgttaaatagattttttagctttttaatatgtttttccaaagtttctcttataggtttcatattaccagtccctatctatatataatagtcctgcgtttctttctaatttattatttccgtttgggtctttttcatattgtaaagctaattcatattgtcttaaatactctgctacaagttgtctttttgcttttagtatttctattgggttattataatttattatatctgtatcatttgtaatagatttaacttctaattcatctgcatagttaattaaatcttgtaatgctttttcatacaaggctttccattcagcacttgttttagtgtaaatatatgttgttaatgtggctctcatttaaccacctctttatttcttcttagtagtaggtttatcttccttttcttctacttcttctttaatttctacatttttatctaaatctattaatatttttataatatctacttgtctacctctaaaatttatatggtcatattcttcttgcttacagatttcttttgcaacttctttatattcattaaatttagataataatagttcttttttattttctgtcaatgttattctcctctaattattaaaataggtaggtagttatatctacctaccttaaaagtaatttattatcctgctatattttcataagtcatatctatctttttaattaaattttctaatttagtggtttcagtatcttccatccaacctactttatttgcgggtgttgttttaccttttgctattgataatataactcctgattctcttgctaatacaagatattccatagggtgtattcttaatttcattccatttacatctgctgggcttgtaatagctttcaaatctttttcagtaactaatgataaccctctttgattagtagctttatttacacattgtaaaatcatatctcttctaccactatctaagaaaattataaaatcatctgacatatttgctatttctataaatttaacaccagcaacattcattacaggtacattatccatttgatggtcgtctttatatttaggataattatataaatcagctaatctatatattgttctactagaagccaatgctataatgtcatccccactataagtgttatatgcttttattaaatcagcacaatctaatatatcattgattgttaaagcacctgatttagttcctctgtaatgagaagtattaccccatttttctttttctaatggattaagaactattgaattatcttcccctcttaaaaatccaaaattagaactatattgttctgctcctgtaccttctgctggtattttaccataatcagagtgtccagtatacaatgcttttataagtttacctggtttaaatctttttaaataaacttgtgagtaaccttgtactgttttagcatcttgttctaataagtttattccattattttctgcgtccataatgtcttctacttcgtgtttaaatacagtagcattataaccttcagaagtctttaatttgaattcttgtaattttctaccaaattcaggcacatctgttgagtatgttcccttagtgaaaaacatattgtgatgttccacaggtattctagcaccttcaattctaattacttctttaatattacttgaaagtatatttacaataggtttttgtaattctggtgcttttgagtttccagttattaagtgcattacgattgcttcaacatctttattccctgaataaagttcttttggcaaatcatatatgctatttcctgctataagtaacaatttatttatcctcctatattatgcttcaaatccatttaagaatactcttactgcaactctattaacattatcaactaatactcctactatttgttccttagtagttcccttagttaatgatatttttccatcttttcctagatatacatattgtccaatagtacctgaacctctagctatatcatataatttagttggattttctaaaattgcaaagttttctactgctaaatatctatcattagctcttttatctgttttaggttctattgtgtaggcttctccccattcaggaaaatctcctttagtagctatacccacagccattttagatttagattcatctgctaatattaacttaccatctgtatcaacagcaactaaagctcctataaaaatgtctgttttaacaggtaaagataaacaaggttgtgccatagcattaagacctgtacttcttatattatttttatctgccaacttaatgtcctcctatttattaataaccattagccctagcccaattagtgattacttgcgcctctttttgtctttcttctaaatctaattcttcttttgtcttgtgttcagtatttagatttatgtttttgttatcaaatatacttgtagatttctttttatttgcactttcatatcttttcttttcttcttcttcatctatgattttagataaagtttctttgtatatttcaaactcttgtaaggctttttcagtatcctcattgtctaaaactaattttaatttattataataaccttgtaagtaaggtttttcttttatttctttttctatatctaatttcaatttagccactttatttactcttttagtagcttctaactcttgttttattcctttaacttcttcttcaaaagtagatttaataccttctaaatcttttttcttttgttcttcaagttctattttagcttttaatatttcttgttcagctttatctttcccaagagtttctattgtttcttttaatttactttctttttctttaagtaaatcttctgctatttttgttttagcttttgtattttctaattccttagatttaagttcattttctgtttttaatttatctaattcagcttttagtttattaagctcttctagtagattaggttcttcttctttcttaccttcatcttttttaggttcaagttcattgttagaagtttttaaaaacttttcttcatcttcgcttaacttttctcctttagcttgtttagataagatttcttctagtgtcaagatatcctcctatttttctataattaattttctctttattcagacatattttgctatgtctaccacttatataacttattctgttttaatgtcaattttttgttgctttatttcactaccattatttaatttatttgctttcactatctgtacatcactatttccaagcattaattcatcattgatttcttgtgttaattgtttaatttcttcttcacttctaccttgttctctccatagttgttgtagtgaaatttctccactcttcaacattaatgaattagttaatgctctatcataagcactatctctaagaatagcagtaggcattttaaaagataaatcaacatctgtttcttcattatacatattatttagttttaggatactttcaaagaaaggcttaaagccattaattatattttgaacatatatccatatcttctgttccattctacgattaatttgttgatataccttagagctatctgaacttgctaaatgactatttaaactaggaggagttaatcctgccttttcgtgtaaactatcgtatacatcatttctttcattaaacatacttctaaggtcatttgatatttgaatgtctttgacttgtgcttgattaggtttgcttgtatttaatcctgtattaaaagcattttgcttttcagtatcagaggtatcttctctatctgatttaatctctgcatacccacctatattcatactacctgatgttaaagtaccatctataacatatattttaggaaagcctataattctattagaacctcttatatcgctttctatttggtctaatcttaaactatcatctatatatttatcggctggtattctactaaatggacaattagcaatatcattagacttaatatgtataatagaaaataaatcactaagtatttcaggatattcagtcttacctaatatacttatttctcccttttttcctttaactaaggcagtaccacttttcttactaccatcagtagacaacatagttacttgtcctttttcaaatactataattacatcttgttgattttcttctactactcttttacttgaaaaatcaaagtatttatcatacttagtagtttgccatacataagttgtaggtttaccaaacttatcaagtataatgtctgatatttcttcagtaggaataattgtaacacaaggtacataagcctttgctttactcttactatcttctatctcttgaaaatagtaatataagaaacaatctcctttactttctaatatatcatatattgtagtattaagggatgtccaattaatactctttaatataggttttaatacagctaatttattttcatctatttgtacatctaattctaatataggacaaaatgcaactaatttagatataacttcttctattgcatcctttgtaacatataatctttttttattatcatcagaaatactatcataatttctttgtttattagggtcaaaaaacttatttttaaagtggtcataagatttcccacttctcatttctttaataatttttattacagcttgtctatcctcccacaaattagggtcataaggtctatatatagacatctacacacctcacaatacaggacaccaagtgtccatatttattttctttatctcatttatctctttcattaagtcctcttttgttgctactaatttttgtttatttctatcttcaaatttccttaaaaatagaaaaaatctatttctaccatcatcataaatttttttccttttatctattgcatttactctctcaataagttcttttaaaccaatattaaataatgctaaactattcatatggtcgtctgaaaattcctctcctcttggtgcagaataatttaatacataattattagttttacctgctttcttttcaaaagacaacatctcatagtataacttttcagcttcccaactagcttgtttgttcagtaattttaacttaccttcatataattgactttcaagatattgaaacattctactctttaataaattattatatatgattggcattaaggatattactacattatattgattacaatactttatgaattgttgagcaagagcatacccaatcgctgtacagtcaaagcaaaatacatctaccttatattctatacactttttgacacacatttctgcaacctcgtctactgataatctttgtgtttcattttggttaaatgtaaacatattataaacagtgctataaaagttagtttcatcaatagtagttttacctataactaaactcttgtaatcgtgtttgattgaagtatcataccctgcaactataaaactactcatatcatctacatcactcactacactattacctagtacaataggttctgtcatacaaccaatagcttctaatatttcttctgtcataaatctaccagttaaaatattagggttaagatagtagttaaattgaatataaggggagttttgacctctttctttaatatccccttcaacctttttcttatagtaaagtgccatattaatatccgttaatgctctaagtctgtatatttcttcccattttctaacaaacttaattacaccactactattatattttgctacaaatacacttaaactgtcttgattaggtactccgaatataaattgacaacccccagtagctgttaagaaaggagatacagatgtttcaaatagttcagcatttattaacccagcttcgtctattacgagtgcatgtgctgaaagtccatcttgtgtagttcctactgatatagctctcatttgactataaggtatactttttttttgtcctacaaacactttatttatttctaagtttgagatttcgtctataagtttactatcatcttttttgtatattaatttatcttcataattttcattgtgaaactctattgctttataaatataaggttttacttctttacttaatttctcaacggcatcattcttataagaacctaaaactaaataaaatctttctaaaggtacatccatatatttgggtatatacacaacagcaaagccactaaatatttttattaattcagatttaccagcttgtctactccaagccattaaaaacttctctgaatttctttcaatagtagcttttatcattacatatagttcactccattgatatacaaataagggtatagagttcatttgtccagttcttttatcaggtctcctacgaacatacataacatagttgaataaatctctatataatgaattgtctaagaataatttaccctcttctgtatctttatcatattcatacatgaacggaatatatgtgtcctcgtctttaatatacataaataatagtttagagtattcatctaaataaaaagcaggtttagataatttcttaatcattaattaacaaacctctctatatctatatcctctacatctttaagtatatcctcatcactagcattaagtttaactttttctctactagctttcatatattcttgagttttatcctgtgctctatctttttcaacattgacaggagatacatcgtctaaattcttagcaaccttttccatactatcaagaatagccctaatatccttacctacagtgtgtgcttcctgaaggtctccacaatattcctgatatttcttagctctatctaactgtgtttgtaattcttccagtagtgcatacctatattccttactgttcatttttatattttcaagccatatagctttcttttcttggtaatattgttttaagttaggaggtaactcacttgctaaaaatgtttcaatttcttctaattctatatctatacctaaaatgtctaatttataatgtatatccacaggagataatcttttggctctcatatctaatattttctttaatacttcttcatcttgtgtgttcacaaatgtatctgtttttaactcatcaatagtcttagttagcatattttcttttctagtccattctcttgtttttttggttaaatcttcttctaattcttgtctttttgctttttcttcttgccatttaaaatatagttgttctttgttaaatttatctaatatagcactattgactacaactttttcttttgccacttattattcctcctttttctttcttttctttgattttttctctgcactctttttatatatttcttttatcttttgatatgtagttatgtctttctgtgcttttgctaactcttgcacagggtcaagtcccatatcttcccacaattcaaatgctaattttcttaatctctctaatgaataatttataaagtgttttggaaatgaacactctctaattaatttctctttctctaattcgggtgtatatactattaaattcttcaatatccctttttttaatttttgtggttttttatttctaatccttgaattagtccactcttcataatttattgtaattctctttgtaacatctctatgatacttgtatatatcataatcttttaaattcaaaatctttttccaataagccattgtgcccatagacacaggtgttttaaatttagttttgtagtctatcttatataatcctgtatcttccataaattcaggcatacatacaagttttctctctggtattttccaattatcttcatctaaataatggtctaataaatactgtctaaattgttcatgtgtcatctttaatttattaggtctactgtctataaacatcttctcatctccttttaaataaaaaggtagtaagtcttaacctactacctatctaaaagagaaaatcagagaaaaatagcatatttgacttttaacaaaaagtgtgctatacttaaatcaaaagatatagaactatataaaagtagcctatatctaaacatatatataacaagattatattttatgtcaattttaattaaagagagggttatatggaacaaaaagaatttaatgcaaaaacagatttatacccctacacacacgagtattattttggtttctttaagactaaacaaatgatagattttataaaaaatatgaataaaatcaatcctaatatagatgatgaatattttagtttaaaactttatttaacttgtttagaacacaatttaaagccaaacaaacaatcagcctactatttacttcaacttgaatggagaaagctaaaaaagtaccctacaagccttaaaaatataaatctaaaagaactcaaagatgaaacagtgttagacaataataacttagaagaaaaatgtattaaagaagtaaataatataaatacacataaattatatgaaaaaataatgaattatgtagaaaagaattgtaaagaaagacaaaaacaagtatttaaactttattttcttgagggtattagaatggttgatattcaaaaaagaatgaattttaatagtagacaagcagtggatactacactaactaaacttataaataaaattaaaaataaattcggtgtagagtataagaaattgaaattagatgattaaaaaagagatagttagtttactatctctttttatttttactcctcaaacaaatattttggtggtagccaattatatataaactctacacactcatcaaaatctttttgttttaaatctctataacttgctacttgaaatttatctttgattcctttatacatagccatataccaacttcttttacttttagaacttaaatctagtaaatattcaagttctattttacaatttattttcttttgtataaatctttgttgtccatagtctattcttatttgattttctactttatcttttaattctaaaatagttggacttgtttcaataaacttattaaattcttctttataattttgatttataaaattttccattttatcaaacttttctatataagctacattcaattcaaaagctataggtacactagcattatatcctcctagcaataaagctacaccttttctagttatccagtacattttatatttcttaaaattattttctactttatatgtatcttctataaaataagttttcacgagagccaaagatttggctttcgtgaatttatctacatatccgtctattttctccaataaatgcttgtgagttactcctaactcttttgctattattctactatctgccacatattttccagtttgttctgaaactactattgtcaattcaaaatttttatctatcatttacatcttctcctttatttccataaactttttcttccacatacattgttaatatttgcctcattacctctgcttttcttaggtcatgcatataacctaatttctttaagccatcattaactctttttgtaactttaacacttatattgtataatcctccatctgttgtttgtatttgttttggttttaattcttgcataacaccaccacctttttaaattttaatttattatatcatatattaatttatttgtcaagtatttttaacttaaaatcttaaaaaatttaaccctttaaaatcaattttaacgagttttattttatttagatatataattacatcaaaaactttttaaaactattttaaagggtatcacagagcttcaaatattcttttctatttccttaattctctcaatggctatctcataatatttctcatctagttctatgcctataccatttctattagtatttttacaagctactaaggtactaccacttcccatagtaaaatctaaaactaattcattttcattagtataagttttaattaaatattccagtaattctacactcttttgtgtagggtgtaccattttacttgggtgcaatttttgaaaagtcagtatacttctagggtacttcatatcccctaattcatctgaattatctactttttcaaatttaccataattattgtttgttatcttggtagttgtaccctttgaatgatttttattacctttaaacttttgtggattgtatgtaggtaactttttataaaatactaatatatcctcgtgagatactaaaggacatctatttgcatttaaaaacccactaggtaatactttatcccatatcagagtatatttatacatcttttcattactcattattagttttgcactgaatgaggattgtccaaagaatataatacaaccattttcttttatgattttatttactctatcccacattttttcaaaaggtaatgcaatatcccacttattttttgttctttgataaggtaaatctgtcagtatcatatctacttttatattattttctattaatttatctaatatgtcaaaacaatccccattatataatcttatacttttattctcattaaaatagtatttcataaatcatctccttattaataaagagtagatttctctactcttattcaaaatactctaaatttatatgtatattttcatatctaatatcatatttctcaaaatctaattgattgtatttagagttacactttttgcataaactatttatttcttcatctctattaaatatatttaaaggtactccacaacaatcacagtaattacctgcacaaaattcgttttccatataagcaaactttatataatctaacctacctaaatagaaattagttattacttttgttatattatattcatccttcttctcaaatattaaatttaaggtattatctaaattttctcttgtagataagactgtaatattactatctgttaaatcacttttcataccaaatatttgttctcttttaataaatcttatactttccttacttggtatctttaaatttataaacatattattttcctttaaacatattcttaaatttacttaaaaaactatttctactctttaactcttgcaccttttccttttctaataaactttcagataactttaataaatcgtctatatttttttgtttatctacttttctaacaatattcttatctatacttgttaatttttctaaggttaaatcacagtattcatctacccaatcagcaatataataaattctttctgacatcatagcagttttatatgttctgtctataaaagcaccaaatacaatggggtctttctcttttgttttagcatttccattctttgctatattttgtttctttttagtataatctgtaaataacacaaaatattcatcaaataatttattatctttacaatatttaattttttcctgtacttcttttggtataggtctttcaaagttttttaattcaattaagaatatatttttatcattagtcatatttaagttcttaattaaatcttgcaattcctctttatagatataagtatctattccatagtttaataattcattctctcttttaatattttttaaaagaaatgtagttttctgaactaatttagtttggtctatacttaatgcactttctaatgtagatactaaattatctttaattgtttttaaactctcgtgatttaacacctttttattatttttaatttcttcaaatatttcacttgtagttttatctatcattatgttcctccttaaatacctctaaatctctaattcttttcatttctttataaattttttctaacacatctaatctttgacaattatattctcttctagcactttgaaataatactctttgttctaattcctcattaatattatgtatttttaacatcattaaataaagtctatgtacatacaattcttcccaatgttcaatattatctaatattacttccatcataagaccatctttttcattatttgaataatatctataagcataatattgtaattgagttaatttatttactctttcttttaatttcttttcttgtttttctttaattttacttgctattaattttaaaatataccaaataatacctatactacttataaataataatttattcacactatcaactcctttttatttttaagataacttattataacatacaaattaaattatgtcaatactttttataaaataaaaagagagtatttaaactctctttaatatatattaaataaattttcttcatcttgtccattattactaaatttaattgtatactgtttagtcatagggtcttttatccctaatgaatatctataattagtgtcaagatgaacagatacattaattttaactgtttcatttcctatttcaactaatgatttatttatttttttagtttctactatattacctaaatcattgtgaactattaaatcaaaatcccattcgtgataaaatcttgaaattcctctattttctatttctatttctatattatcagtatttattttagaagatttaataaacaatttataacctaacatatcagatatttctttactttgagagttccatttaacattgttttctggaattttttgtcctatgaatatatgatgagatttttttatcatttcttttgttctatctaattgttgtaataacatttcatccattgttaaagaagatgtaaattcccctcctattggacatctgtcccatatatcaggtataggaactatggcatcggtttcatctgtttggtcatatactccacctttttctatccatcctaaccaatcttgtgtatcacttggcatacctatcatatcgttatatgttcctaatccatactctttacaaggagaaaatggtcttctcatcattattttagcataagggaatttacctatccacatgtctacatatttttttaatataggcatcttaggtaattttctaactttgttgttgtcaaagtttacatgccattctccccaatgtccaacaacaccaagctgtatataacttataaatgggtcattaccatatctttcagctaacttatctacaaatatttttaatttatctataaatttttgattttcataataaggtgaccaacctttaccatattcgtgagaataatctttgcccattgttttatccttatatataaaattaggtacatcgtgatgtttctttgttgttggttcatccaataacaatctaaatacacagtgtttacccttattcttccaatattgatatagcgataatttttcccatttttcccaatcataagaattttcatcgttgttttgaacttcattccatttcatatcacaatatactaaattaaactctatatcccctaatgactgttcccatctaccataaggagcataacctataaggggattacttactacaggtttataaatatactcttgtttatctttcacaaattttctaatattaacttctatctcaaaataattactttctaaccattcttttattttaattaatttgatatctaatttatgtatatactcttgtactcttttatctaaattagtagatattccaactgtatagaacacaaaatcactaatagcttttaatactttatgtctgtcatcaaatattttagataatatttctttttcataaggtaaacttactactccatcattccaatcatataaatcattcccctcagtaatcataaatttactgaaatatactttttgtccttgttctattttagggatttcgaatctcggtaagcattctccacttttttctactgtgaatttataattgtatctagtccactgattagttaaatgataccctttataatcatcagatacaattactgttccaccctcaatattaataaatgcagatatatcattatctactttttctgtttttatccaagcactaaattgataagtcttacctttttcaactgttattttttgccctattggtgtccaagctgtctttatagatactattttactattctcatatgtttcactttctatactataattttcatatccagtccaattatcatttctagcaaagtcattggtattttttaataaattaccaccttgtttattcttaaaaaatttatttaattcttcctctttattaattcctttaataatattcaaataatttttatatttaatataagtagtagatgctatattaatatcaaaattttgactatctatatttataacatctaaattatttatatttagtttgaaagggtatttagacttttgttcatcttctaataattttatggttttataaaaaatattatctatataaatatttttataataaatattttttatttgtgtaaaatctatctgtgccattttattattcctccatttgtattactaattccttaaattctctaactatatttgtcatataattattttcttcaatcgaatctttgactgaacatttaagattaaaataaataacctttcctttaaatatttctaatatatcacaaaaaattaatgaactttctaatttatactgatttgaatttaattttatataatttatattgtcaaaactataactaaattccgttacactatgtatagaaaataaattttgaatatctaaatccaaaccaaaaactattttattaatatctttatctataccttgagttcttatataaaacttacttaaaacattatcacacatattcatagactgtattttataattttttccatttattgaaatatcatttccaactaaacttatattttttaattttgtatataaatccgaagttatatttgtatgtaatattttaaattgttctatattagaatcttcttgatgactttcatatttataatttatattacctagtatagaattgtttaaaatatattctatatccttttctaaattttttaaagaatatacatataaatattcaggaaaatttgggtcatatcctacatagtaatcctgagtagagttctcattaaaactttttgtctttattttattttctataacataatatttagattcagttattttttcataggtatttttaggtataataggaatattaaattgattataaatattttctgttaatttacaatcaaatatccataaagaatctaaaattttatttataaataagtctgaaaacatatataaatttaattttgacaatttattcttaagtataacttcattacttaattctttccaaacttgttgagaataaatatcaaaaaattttgaattttttaatgataaaatctcattttttattaaaaaatttatattagaattaaataatttttctatataatttaatttattttctttattaaaatcaatctctaatataggagtcattcctctttgttgaaacttacctgcccccgatattctaactaaataatatattcctaaagtagaattatttacatcatctacaatatttaatttaacatctacaaatctttgatacctattaccctctatatatatattacttggaataaaaagagttaatatttctgaatttttattattttttatgatgaacaaagagtaggttattgttacccccataccttcgacatcagttgattgtgattcccaatcaataatacaatattcattatttattatactaggatttaagtatttagtatctttataagttaatttatcaaattttataaaatctaattctgaattccataatttatgaccccccctatataattctaggatggattcatttttagtttgtattttcaatatgtcattaaaatctatattactcatattacccctttttaattaaataaaatttatgagggtctttttgaggtaaagcttcatattcagatttagttaatactacacaattcttttcaaattcttctaaaaatttagtattaaaatcctcagtttttaaataagaacttaaatcaggctcttttatatctaatttaccttttaatttagtaaactcattttgttgtccttcatctataattttattcagtaaagtattcccattaggtaactcttgttcagggatattaaactctttattagtattatttgttaattcaacatttattttcttaccttgttgagtgatattcttaatacctactccatctaaacctttagcaccattaagtccattttctcccttatccccttttatagttggaatattgaattttttattagaaccattagtaagactaactgttaattctgtgcctgaacttgagatattagtgatgcctacaccgtcgttacctttaactccttgttctccttttaataaaggtaaagtaacagtttttatttcatctgtatccaacttaatattaagattattacctgtaagcgaaatttcttttatacctacaccattagtaccttgtaaaccttttaattcaacataagtataagaattttcagtagattttttaattcctaattttgtaccatcccagttaaaatctaaacttataccatctttaccttttaaactaggtaaatctatttctttattttcattattcattttataagtaatttttttacttgaaatgtcataaactaggtttttaactagggtaatatctttaacctcatataaagtatttcctttgtttactactattgtttctatatcttgagtagatggatttacataagaacttaaatctatttctttacttaacccattttctttatatttaattttgttattttcaaaaataatttctgtaattgttttttcttttaaagtgtttaaatcagttttatctgcttttaatcctaattgagtaataatagtattaattttattagggtcattccctaaagcttcagcaagttcttgtaaggtatttaaagcttcaggtgcagttcctactattttttgtatttctgcttttacttcctcaatttttactgctgtagctttatcttgtttattatctatactactatttaaagttgctatatcttgttgatatgtaaccttatccaatttagtattcaactctgtttgactagcataacttcctttaggctgatacttactatctgcttttgtttctgtaataaaattagtaatttctgattttttagcataattaataagttcgcttttttctgctttactatctatactaggtttataatctctatctattatagatttaacttgaccttctgttaatcctcctcctgagttattaacaggtaaattaattcttttaactacatcattttctttgaaaactaaatcattacctgataaagttaattcggttgttgctatatgttttaacttatcaaattcttttttggtattgtatttgttatcagcatcaacacctttaataaattcaactatatctgttttcttagcataattttgtaaatctgttttatcaactttattatctatgctttttgctaaatcctcagctttacctgtataataccctttttctaatttagaattaataataggtaaataatctgtatctataagttgttttacttgttgtgtagttaatcctccactcccactaggtaatactatacttttttcgataccattttctttatattttaatttatctccaactaattctaaatctgtaatagtttgagttaatttattagtatttttatctattgacttttttaattggtcagctgttatatttttatctaaactacctctctccaatttactgtctatttgaggtttatagagagtattaataagtgtttttacttgttcttctgttaatccttgagtaccactacctccactaggtaatgtaaactcttttacttgtccattagataaagttatctttaatttatcccctactttttcaatgttagtaattcctattccatcattacctttttgtccttgaacaccgtcagaacctttactaccagtatcccccttagctccttttaaactatctaaaaattcagtttcattagctgtaggtttacttttgactcttttccaagtttcaaaagctgattctcctgtattacctttttctcccttttgaccttgtgtaccgttttgtcctttaagggaatttaaaaagtcttgttctgtacctatgtttcctttatctttccaaatttcataagctgatttaccattaataccagctactccttgttctcctttaagtcctctatctcctttaaattcagatttatgagtatctacataagctttaacagatttattaattaatgttgctaaatctaattctttattactattattagataaagtatattttagtttactgtctactaattcacagtcttttaacataaccccaataggtacttgtgtttttattctatctattacatcttttttaatcttttctagttgagcaggagttaaaggattactagacccccctccaaaaccattttctaagacataatctaatattttattacaagcttctactaaaggtaatattcctacatcttgccctattaattgtgcatatattccactcatagcttctactgttgatttcaactgttcctgctactaaaaatgtattaaaatatatttaatacactagaaaattactacttcaacgagtatactttcaatacatagtatctactcatagttccttgtactctccatagtcgtaaattcccgactagccatcggtacatatatatattctcttttgctttgttagtagctttctcctttttatattatttgagaatatatactctatttcaattataactttaagctataattttatatacttttgcttgttctaaattaatacttgcattgtaatctctatctatttctaaaccacaattacaacacttataaatcctatcattaagttttaaatttcttttaatactaccacaacaagaacaagttttggaacttggatagaaggtatctactatccttagttcaatatttctttctttacatttatttataagtttagttcttatactataaaaattttgctcttgtatagcttttgatagatgtttattctttatcatattagatacttttaaatcttcaatagtaatgtattttaacttggctcttgttatttcatttaccatcttattattataatcatctctaatacaattaagtttataaaacaatctttgcaattttaatttcttcttattaaaattcttacattcttttaactttatcttcttagactttgagtattctatactccttgacatctttctttgttctctcttaagtttctttttaatcttttttactttcttagttttatttatatttttaaataccatttcattagaacatatagctgtatctttaattcctaaatctacccctattccttttgtatttttattttcagttttaactgtatcatctacttctataacgagcgataagaagtatctatcagctattttagatatagtaccacttttaatattagcattcttaggtatgtatccatattcttttactcttacaaattttaaagtaggtatctttattttatatctgtaaaactcaaaatcagttttattatttttaacaaaataagcacctatttcatttttacctttctttttaaaaacaggaaaagaacttaagcccttaaagaattttttaaaagccttttctccataaatcatagcttgtttaactgatttagaagatacttcttttatccattttttatcaggattattaggaatatagacattgttaagatatttagaaaattcattagcactaacaaacttattacctaatttatgttgttcttgattatatttaatatattcattatatataaacctttcaactccaatagttttatttacttgtatcttctgttcatttgttagttttaattctatctttagtgctttatacatcttctactacctttcatacatttttatactttagcatatatttctatataattttattaattgtttttacctcctattatgaaaaagctagactaagaatgtctagcttccttttcttcttgaatatgtgttgccatatctacagataatttttgcaacatatcagttaatttatccattttagtttctaaacttaataattgtttatctatttgttttatctgtatagcatatacatcattatctattttagctttaatcattgccattaattcttgtttatcgtgtttccattctttttgcattttttcttgagatactaatatccatttagtatacccaatgaaaaatcctacgattgttcctacaattttaaaccattcagtaaatgataaagtatccatttatctattcccctcataaactattaataaaatcaattaacacatttacatattcttctatggataatacattttctttattattagcaaagaaaggctctactaggatataagtaccttttgagttacaaataccatatccacccctatccttttctgttttactaggtattatccctcttataatatgcttaggtctatatttcttaatagcttcaaaatatttatttattatttcttttgctttttcatttttatagtagcacaaagcgagtgctccatttgtttctgtatcttctatttttgcagtggcattaaaatgtaattcaactgcaactttatatttttctttatctaattctcctaataattctctcatttgataagaataactagggttaggttttctgaatagcactcttatattatattttaattcattttgtttagcaagaactttattagcaacttctaagttataatcatactctgacatttttaaaacattagaatatgcaccttttgaagcactattatgtcctactattaatacaactgtttctttttccattactttatctctctaacttgattaccatatttataatttacataactttcactaaatcttgaaattgttttagaaccaaacaaaaacattattatagtatcacaaatactaactaaagtattatctataaccattacaggaggtattttatgtgccattgaataacctaattctacaaagtaatttacactaaacattaacaataacataaacagaaatgctggaataactaagtcttttattctacctagtttatcaatataattccctctttcttttaattcttctatttgtaaattacctaatttttcaagtatttctccttgtgttttttcgtcagtaggtagaaatggttttataatatctataatactattaaaaagttttccacctaaaaatgatgctaaaaaattcatcttttttctccttgtatttatttagactttgtatgctttttccaagcaaatttaccaaacactctaacattaaaatagaataaataagcaactattttattaactccatcttctagcatacaatctaagaatattttgtcgcatacttttctatctatgaattgtgttttataaagaaaatcgtgtataatagcactatcagtccatctatgaaaaggtggaaagattgcccaaagaaatctaggaatactagcaccatctgaaacaaaaccttttggtatttgtataacagtgtctgttcctacttttcttttggtatcctcatatacataaattttcttggcttttaatataactattggtatcactgtaatttctccttgtgcaaataaaaagaatagacaacttattgattgtctattcaatatataactaatgaattttaaatgtcaattatttactaaaatcatatttattaatcaaatctattaaatctcttaataaattatccaccttttcatactctaataaatttatactgttatctctatatacaaatcttattgccctttttaaatcttctttagtttcacacctttttaaagtatcctcatttatctctaattgtattttaaggtcataagagggtgttataagagatatttttatataaggtatatatttactacctaatatattggcaacctctttaaactgtctaacaacttgtatataaggatgttgacctttactgaaatatttatatcttaacatatctacaatatctgtcaagtatttaatatctattttttgattataaccaaagaatttacacatatcatattgatatgtctgttctaatagtctaatttcaagtctatgatgattagatataataaaattatatacttccatatcatctagtctacaataaatacttgctgttctatctttttcttgtaagcctactttatatttaaagtctactctaacagaattaatatcttctttaactacatttattttttctaattcataaccttttttattacactctaattgacttataggacaatgtaattttgggtctataatattttcacgaagtagccaatcaacaaagtcataaaagttatcgtagttaaatacattattttcctcaaaagttagaattacaccattaattatatttccttttttcatattatcaactccttttaaattttataatagtagtatatcatattagaattaaaatgtcaatataaaaataaaggataattttacttatcctttattttctttgtttataccctagttttaatagtaattttctaataccctctaaccctttgttagttacgtaagtagttacaactactctatcatttataatgctttctttaatagtaaaccaacctctttcaaagtaagattgataaggttcattatctttcatcaaaactttatttcatctaagtatttcatatagtctatttctacctaaattatagaaatttaatattttggcactctttttcatatctaaaacatcttttaattctataagagtatcataaaattctactttaggtttatattctcttattttactctctaacttttctgtctttttgcacttaattagtaattcttctaatgcttctaaataattacttggtaatcttctaccatttatttctctcaattcttttttcatagtaaaatactcatctatgattatatcataaatcttccaagctgtttcatcttctagtaattttacaagtttcatataacctctgtctgaaagtatataaagtcctttaccttttcctctataagaattaatagcttgttgagtaactcctaaatttatgatttcggtatcgctcaaaccgatacctaataagtcaataatatcaataccatctttaaatttatctctattactatttattaattcatttatatgataaattttcttattatgtattcttgccacatccctgactaaaatagctctcttatctattccaaagccaccttcaatcccttcaaattcaaaattacctattttaactttccctaataacaccaaatctttttgcatataatatcctcctattattttaaagacaactttattgccccttatactctttattaaattcatggcttaaatttaagccaccaaactaaattgaactaatatttatattactcatagtgtagatttacactattgattttatatttcttactctacttattacatatacatcttttatcctcctgtgttttttccttaataataacttgtttatttaccttatcaaaaataacatatacataacttttctcttgtgttattcctacactttctaaatcagataaagataattgtattctagcttgtaatgtagtatgtttctttgatggataataaaaattaaattttctgaccttttgtatattaatattaacacctcctattaatatttgtgatacacaatgttcctacataatttattttataagagaggtagtctgcctttacctctcttattttttattattttactaaatcttttacagtttgtgaaaatttaaatttaggtgctttatgtgctggaatagttattgcttctcctgtttgtatatttcttcctgctctttcttctacatctttcacagagaatgtacctaatccaaagattgatacctctattccatctactagagagtctttgataatatctaccacacctttaataattatttcattatctttattagaattaccaatacctctttctcttagagttttagcaatatctccaatattaattttactttctgccatattttctccttttctcttaaatttgtatttttataaaaatctaaatttacagaacttatcgtaacataacagtacataagataacccctgtactaataaatgtaatatgtaaaattggtagctttactattcatcttctttttattgttcagtttgctgtaaagttctgtttattttatttacttaattaacagttgctttaacctattataaaaggaatgattctataatactctttcatctgtatttatcttttatttgctgttagcaactgtatgggtatcttaacagaatacttaaattagctttttatattaaccagtataacgctctattccaacttaatttgctgttgtattctgtttattattttaatttaaagaacatattttcctattaatttcaaactttatagattttaatttgctgtgatgttctttataaatatattatagcatattaatcttattttgtcaagcacttatttagaattttttaacaaaatttctgaaaatatttctataaaattattaaagtcttggtaactataatatttatcattaatttctaaaataggtgcagacattatccttaatttactcccaactttcataagttctttttcatcctcaattacttcaaacctaatattataattatttaatatatttttaagctgtaagcaattgggacaattttttttggtataaatttttaacatatattaattccctttattaattttatggtcagtgtagtctgctctgcccagacgacttctcgttcccaaaacgagtgttctactaactgaactatacactgatatggagtaccctattagaattgcactaatttatcttgttttgcagacaagtacctaactaatcggtcaaggatacatattggaagcgacacccacatttgcagagggatttctagggaatgagcctagtgagttactattactccatatcgcattatgttgcatttttaaatacaatcactcattataaggaaagagtaaaaatgctaaactcccaaacctaatatagtctaaaactcttgtatatgagaaagccacctacactatccgctttttattagttgcaaaaggttggaatcgaaccaacgaactaaggaactaagaagctacctatatcttacctcttgattacttttgcatattttacaatcagttctagtgaaactttgggtcttggacttgatgtttcacatctgaaggagagatagttattggttactcctatcaggtatcttcggacagcaaccttcacattgaatttaccaagataaatatttctacttataaggctataaaagatatctcttgtcccttttattgttaaatagatactcaactcatttatattcttgaaaggaggcgaatatttttacaatgtaattttactcaaaagatatagttgaaaacttaggatatcttttagttgagtatctatttaatctctcattttttaagtatatagggtaaatgagagataaacctatataagagttcgtttactaacctgaaactagaactatttaaaaggctactttatgataagtagtaactgattttatctttaaaggctttaacaaggtatctttaagagtcaaaatcctaaaactcgtttttaagtttaattggacaagggtgtattagcaagggtaagttcaaaaccttgttggctaactacctcatcacttgctgtctaaaacctctcacgaacttacaaggaaagagtgtgtcatcacaacttccacagccaaaagttttaatgtaagtgaaatctcattctccatcaaatattcatcttacacagtaattatatcataagaaataaactttgtcaagtaattttattaaataattaataaaagttctatatttttgttattttatattggtattattaataaaaattttttataaaggttctccttttaatctcttaattgctatctcataataattctcatctatttcacaacctatcccttgtctatttaactcttgacaagctaataaagtagaacctacaccacaagcaaaatctaatactaattcattttctttactagaattttctattagtattttcattaattccacaggtttgaaagtaggatgaactactctaccttctttatcttttaacttaatattaggtacatttaagatatcacttgtaccacaattatttatcttaacacctttaccttttctaaagaatagaatatattcaaattgggacatataatattgccccattattttatttcctttattccatataagagatttaataaaatgaaagccactatcttttgctacattaagataattttgtaaattagtatgattacacattatataacaatgtccaccatcttttaataattcataacataacttaaaccaatctttacaatctaaattattatgttggaacactttaccttgtctattaatcttttcttgtaacatcccaccactattacctgcattgcctctacttgtaactctataaggtgggtcgcatactattaaatctatcttattagccattcctatatctaatagtttttgcataatgactaaacaatcttcattatatagctttatttgtttattttcactaaaataataattcatagtcctaacctctttttagtattctcaaaattttctaagtctacatcacaacctataaattttctattcaagtttttacaaccaagtgcagtagttccactacccataaaacaatctaaaattatatcattttcttttgaatgtaaagttattaattgctctattaattctagtggcttttgtgctatatgtagtttattcttatttgtcaaaataggaaaagtttttattttatattttaaactaatatcacagtcattattaaaataagcacctttacctctaacatatatcataaactcactatcgcttatatattttccattacataaaggtgcaggattgctttttctccaaactaataaagtagtagataatcctttattttcaaaataactcataaaactacttatttgtttattgctacaaaatataattaaattagatataacttgtaatttcaataatttattaaatatagtttcatactcaaaactactatctatacctttaatttctgtttttacttttgtcattctatttgctaatggctttttacctaatccgtgattatctaacaagtatggtgggtctattaaaactaaatctatatttacattcttttctattaaattatctaataaaaaattacaatcacaattatataatttaatattattatctttattaaaatagtaattcactctatcaactcctatctaaaagggtatatgctttggagcatacaccctataattaatcttattataattctattttatccattctttatatctactaatgacatctacataatttactgattttaaccaattaatatcttgttcagttatccacttcataaagttaatctcaaaactatctttacatattctaaatgggaaagcttcttgccaatgttttaagtaatattgataacaatatcttacacttttccattttaaataataatcagacttccatttaaacataaatcctttttggtcagtaaacacaaaaccttcaaaagcattatatttaaaagtttgtaataattgtttaaagtgttcaaaatcatctaatatagcaactgtatctactactcttattattttgcattctaagtctctcacatagtctttaaactcattcaaaccctttgagctataatttacatcaatattaactccattgacctctaaattgtttttaactacatctaataagacaagttcttccttatcaaagtctattatatgtttgtctttgaaagatttaacctcaaatatgaaagtacaattttctttacttgcaaactcttgtaaatacattttaatattagcattttctttatcccataattcttgaaagtaatttttccaatctccttgtgtagtagatttagttgctaatacaacttctccatttactactgacataagtcctaaaaatccattttctttatattttgctattaaagggtattgtaaattatttcgtaattcttctatagtagtttcttttctttctcctagattccaaaatttttggtaacttctaagtttaacattacctgtatctctatcaacaaataaccctcttgcctttattgtaatatcattccattgtttctttctaaatacattatctccaaaattaagagataataagttaggttcacattgttttacttttactaatttacttaatataagtttattcacttcatcattttgagttaaattcttactttcagttctattatacttttctttttctctattaaaataatctttatcataaacttcatttttaatcttttcaagtcttggttcttttcctttttcaagtacataatacataagatttccaccaaactctacttgaccctctaaattaatagaatgttcagtacacttattagctctatgtccaaatatttgagtaaagtcttgacattttcctagtacataattattttcataaataccacttatatcatcttcataatctcctatacctttaatcatatcatctgttgctatataggctaaaagaggaacactaggtaacccagcgtgtgtacataaatattttttaccatcaaattcaaaagcataggcttgtctttgtttcttataaaattgtcttaacttagattttaattgttcaagttcttcatcgttaagtccatctataagtgtaggtaaagtttcatttaaaaatttcttgctttttatttctctaccttgaccatagaaacattcccagctatgattcccttcaagcaatattacattttttaaagttgataggtacatcattctttttaaagtttccttatgttcaatacctctgtccaaataatctcctaagaatacatataaggtatcctctctatatccttctttatcaaacatttgtcctaaaactgtattacaagaatgtatatctcctactataataactctattgtatttatctgtaatattatctacataaaaattattaatatcttctattttatcaatcttttttacacctttagataattctgtttgttgcactaatgtatatattcttttaattacatcttctggtacaaatttatatttatctctcaatctatttctttttaaacaatcttctaagggtgtatctaattgctttacaaatatagtatatttatacatttctgccattgctttatagttatttaacatcttttgtgtagaatgtgtggcatctataacagtaaaatctcctcttttcattctttcttcaagacattgtaataacatattccaagctaatctatcattcttttgactaattgaaaattctccatctaaagataaaataggattttgaattactactctcatttcatcagcacttaatgtatagggttctaatccgttttctttaatccaagtagactttgaacttgcaggacatcctctcattaatagtagtgttctcattaattaccctctcctttatattttaattttatttaatttttctttaaattctttgtttatatcttctattgtaggtacctttacatctgaatttaatacccattctcttgtaataggcttagccttaaatacttcatctctaaataactcatataattctttttgaggtatagttatagtataccaacaatcagctacataattttccacttgtgttataaaatattttgattttaaaaacatatttctaggatattcttttattaattcccacattttttcataggaattatttactaataatcctttctcatattttaataatcctagctctacccaagtttgcataattttatcaaaatcataagttcctataattatattccttattttattaaaatcttggtaataataattatctaaaaaatcaggtactctataataagtatatacttgctctctaaaactcctaaacatatctgtaattctattctcaaactttttataatccatattctctaaaaatctattatctgtttgttcaattaaaactctcatactttttacaaatataagtacaccttcttgattatatttcttcttaaaaaatttattccaattttctttatacagtttttctatatctgaccaagtacatttgaatgtcaaattattattacactgttcttttattaaatttttcatatagtcattatattgttcttgtttagtcatctatacctctagttaataaactcattatcttctatctttttaactaatactccaccatcttttcttctttctactatttctaatcctaattcagcaaatatttcatcagcaaaatactttgctttataatctattaacatttttaatacagggtcagccaaaaatacatctatatcctcataagaatctctgtatgtatcatattcatcttttctttgttctactatgtactttataaacaaatattcttctgttagactatctgattttgtttttcaggtaagttttcccattttacaggaggattccaattagcacctacaccctttaaaatactttctaaaattccagtataataaatatgtagagcttccactccccatttgttaaaaaattctattgatttatcttgtagtaattttaaatttttattttccatactatccactcctttttaaaaaattattactcataattattattttaaataattattatttgttagactttgtaatttacactttaaaacaatttttgaaacttatgtatataattaatccaaaaagtttttaaaatcgtttttagacctatcacagacattcagaattgaaattttagtctaatgagaaataacataactcacttttaccaatcaatcctaattcagttaattgttctaacttgatttcaatatctttactatcagtaagtttattatctaatttagacactctattaattatatctgtaacactaaaatctcctttcatatctaaaatagcacctacaacaatatttttagcttgtttcttttgtggcttgaaaggttttatagttatagtttgattttctatatcataatctataactacttcattattattttctttatcatatcccattgcctcaacctttttcttatttaggataagacggatactctcgtatcctcttcctatatttagccaatttaatttacttactctcatttaatcactctccttataataccttttgaccaaagtaacaattactatctctgtcaaagtgcattactattaattcataacctaatctcttacaagcctttacaatagcaagtgttactactatcaaccctgtaacatataaaattatttgaactttgtcattacaagttttacttaattcattgaaataataatccacatcttgttgtattttttctacatctgttacatctttaatttcattattaaatacataatccgttactggtaattgatgtctacctttaattgttcctaaacttattttaatcataatatcactcctctttaacttttgataacctattatagcatataaaatagattatgtcaataaaaaatttaaaatattttactaaaaataaaagagtagaatttactactctttatctcattgctttcttatatcctaactcatctaacaactcacatatcttttctatccctttttggtatactactgtttgaggtactactttatctcctttttctgttataataattttaaaccaaccagcatctacatatttctgataaggttcattattacctcttaatactccatttaatcttagaatttcaaataatatgtttctaccaactccaatataatttatcagtttagcaacttctgacatagtaaaagtcttatctttgtctgctattgtatcatataaatctaccttatgtttttgactttttaattctaaatcctttaatattactttatccttttcttctttaagattattttcaagaggttgaacatattgtatttcatattcattcattgctattgctcttgatatttctgtatttgctttaattactttaagcattaaaacatcttttgaagataattgattttctaactcaataattctcttttctaacttttctaagtaaagtataacagctcttctaacaaatttagattctctcattaaaacttgtttagcttgatttaaagttagaacaaacataggatattccttacctctactatttatataagttgactgggaaatttttcccagtgagatttcttcttcaaattcatctcttataacctttaataaatcgttgtgtccaagctctgttctattcccttcttctcttctaaatatattaatctgttcaagcaattccaagctagtaatagtatccttaattctaacctcttgtttaggttcttctttcacattcttattaaagaaattcatacacatatagttatatctttcttttgttctagtgtcctctaatatttcaagaaattttaaatacccactatctgatagtaaatatttatcctttaattccaagttattatttttatctacttcaattaattctttgttttcaaatttatctctacataaactaatcaattcttctacatctttaactttatatttgtgtagacttgcaatatctattgttccaatataagaaataccttctacatttaaactcttaacttcataatctcctaattttatcaaattattcaaactaattttcattacacatcactccttttaattttcctcatctttgtaatttagaggtgtaattattactttcttatttttaaaatcataatcaatcataacctcattattcacaaggttatcgcatcccatttgttccattgcttttgtatttaaaaacactcttatagctgtatgtccttttttatcaataggataccaactaagtttatttactcttttcatatgaccacctaccttttttaatttcttatattataacatactatttaatatatgtcaatagatttttattaaaaattatagaggtatatttcaacctctaaacttctttttgtaatgtttctttaattctcttaataaaatctttataactttctccacttaattcttgtaatttcttatctaatttatgtaattttatttttaatctgataaaatctaatatcattattacaagaactattagtaacaaaattaatactatgtttaatcctttaatatatcatcacttccttttaaaagctctatgatacctttatttaacattatgtatataaaggtatactctttataatcatcttcatctgtttgctccaattcatatttataattcattttaagaataagtaaagttttactttttggtatagaaaatatagcatctcttataggttgcattttagaatagcaatctattttaaattcctctctaaaatatcttcttatttctgatgtatctttaatattccatacacctttctcatataaatcattccatagagtaaaactattataattattttcttcttttgattgaatattgaaagcaataatatacttacttaaaaaattcacgtatcttttaaatcctatttgtctagggatatgataattataagtttgaattagtttatgatttcttttcttattcataaattctcctcatacaacatacataacatatttctttgcatattattttctattggtgtatattttctagcaatataatttcttataaaagtctgaaaacaatttaatatttcatataatagtatttctgatatattatccttaaacataaaattaacatcctctaactcataagaatttatatattcaagattacttttatcttttatttgtaaataaccttcatatataatacccttaatttcaacttttagagcaactttatgctcttgttcagaaaataacatattaactatattaacttttttattcttaattctattagaaattttatttattatttcaaaatattcttgtaaactttctaatctcatttcatacctcctattttaattttagcttaattaattataacataatttattaatgttgtcaagtaatttatataatatttgacaaaaataaaaatgtatgctataatctaggtaaattgagtgtggaatcctatacttaccattttacctagtgttcacttaattttgggggatgttatgtactatcggtttcgttcgtttcactcactcacctctccctctctcattttatattttctcttttctttttgtgttttctcctagaatctttctttataggaaaaggctaaaaaaagtatttagtaccaaaggaaaaaaatggggttgtggaaaaattgacctaaatttaaaattgcaaacactgaatttatgggaatgtttatttttagaaaatttataaaaaattaaagttttttgtttaataccaatagaaaataaaaaatatgtggaaaaattaaaactaatggttttatgctaatttgagaaaagaaaggagtattataataatgcaacacgataaaaataaagaatcaaaaatacaagaattagaacaaatgttaaaaaataataaaacaactctaaaaacttttgaaaaaacaggaataactaacaaaactgtacctataacaattatagatgcaatatgtgggaaaggtaagactcaattttcttatcaaaatataaaagataatataactcaaaaattcatatatgtaactttatatgtatcagaaactcaaagattattaaaattttgtgaaacagaggggatacagatacaaacaccaaaagaaatatatgataagactacaaaaacaaagaataaatctaatggattaagagtattgttgcaacaaggtagtaatatagttatgactcacgagttatttaagataattaatgaggatgtattatatttaattgagaaatatgattatgtcttatatttagatgaggttatggatttaatacacccatatagatttttaactggagatttatacctcttattattgaatggtattttaaactatgatttacaaggtaaattactttggaaagaaagttactttgattattataatcaatgtatgaagaaaatggactctaattgtgatacctctaagaatacctatgtaggagtatttaatgatttaaaagcaaagtgtgaaaataattcattatatttatttatgtttgaaaataaagataataaaacgactagtacagagatagtatatatatttccaccaaatatatttacatcttttaaacatatctatgttttgacttatatgtttgaagcacaattacaatcagtatattttaaattaattctaaatgaatatgaattaaaaacagtggattataatactaacttggataaatatgaattaaaagactatgatgtagaagaagcaaaacaagagtttaattcttataaagatataatgaatatatatcaaggtaaatataatgatataggtaaaaagacaaattattcttatacttatttacataaatgtgatttaacaagtattaataaaattatgagaaatataaaagaacgagtttggaaagttggaacagaagaaattttatggacaactataaaaggtacaaatgaaaacataaaaaaagagttatctaaacaaggctttaaatctaattttatacctatgaatatgagagcaacaaatgattatagatataaaactcatttaatgtatatttataatagatatatgaaaccagatttaaaaatgctatttaggactgaattaaatgaggacatatatgcactatcagatttagtacaatggatatttagaagtgcaattagagatgataaacctataaatttatttttaccttcagaaagaatgagaaatttaattgagagttatgatttcttttttgatttaatgtataagcaatatatagaaaaacaaaattatataaaaaatcaaagaatatatattcttacacataaaataattaaataaccttgacaataacaaataaaaatgttataatatatcatataaaatataattaataaggagagtgataatatggcactaacaaaaaaacaaatgggagtggatgcttataagtggtgtttattccttaaaaaagaatttaagataactgatagtgtagcttctgctatatattataaatatgtaaaaggtgtattagcagatagaggattactagaaataggatataagcctacaagagaattagatagtgtatggatacctaaatttagagcagacttacaaaactttgtaaaagatgtaaaaggaataggattacaaaactatctaagaatagtaaatggatttaactttgattactttaccataactacttttaatgtacttatagaagattttattgctaatggaacagaaggaagtacaatactaccttttagtaaattctttgagtatgtagttaagattactgatgactacaaacaacaatataataggacagtagtagataagattacaagagagaatgtattagataggataagagtatctgatatattattgttagatgtacattgtaaagttatagatgtcaaccaagagggatatgcagataaggtggagtttataacaagtagagaggcttattgggtggaaaaaactttatttaagtatctaaaaatgttagaacaagaaaaatatgattatgtaacacaagaaaatattgattatgtattaaaaaagaataaggctaagttgaatgaaaaacaaaataaatttatacaagagttctcaacatatgggtttaactgtcttataggcttaggaggttcaggaaagtcgtatacttctaaggttgcaatagatataatagttagaagtggctataatgtggtacttatgacccctactggtatatcggcaaaagtattaactaattacacaggtagacaagcctttactgttcacagatactttttatctatgaaaggtgtaggaaaatcagaagcaatagataaagaagaagatttatatacagaaaatatagatgaaatggtatactattgtgatgaattaggtatgtggggattaactcattttaaaatgttatgtgataatatattagaacctgcaatggcttacagagaaaggttcataatagaaaaccctgatgtacctaaagaagaaatacctaaattacctaaattagtatttgtgggggatacaaatcagctccaacccatctcgagtggttgcttctttagagatattttagacctaataaaaataggacaaataaaagctaatctaacagaattaattgaaattatgagagcaaaatcagacacatatattccttacatatgtaataaatattgtgtagactattctcctatggaggatactatgtatatgaatgaagaacctaatgtatttatgctacctctatctgaggaactagaaactggagatgctttaggtaaatttatttatgagtatatgcaagaaatgaatagtgtagaccctaataatccttataattttgaaaatactactattatgttaccccaaaaggtaggagataaaggtactaagaaaattaatgaagttttagatactctttataaaaaagataatcctaatgctaaaactattggtatgattatgaaaaataattatgatttaatggtattcaacggggataggtttagattagagggtaaagaagtttatgaggaaaatcattattatgataaacaaggcaacccaaaagtaaatatagtatatgaatatactgttactatgctagaggatgatagagaggtcaaatttaaagatggagatgttaattgggaactcgcatattgttcaactgttcacaaattacaagggtgtacatcagaaaatgtaatatttgtagcaagtagaacacatacatttatgctaacaaaacaattagtatatacagcattatcaagagcaagtaaaaccttaacagtattgtatgataaattcacttttgaaaatgcaagaaaaagagatacaaagtacaatagaaaaacattcttaggagaaatagtgaaattaagaaagggaaaaggtggtagataatatggaaaataacaattatatagggtgtaaaaattttaataccccagaaatacaaggaagaattataaataaatttactaagggaaaaatatctcttagtaaatttaaggaggcactataatatgtttacagttacaggattaatgaatgataaaacaaatgaattggatactattatagtaaataataaaaaatatgagtggggagggtttgataaaggtattcctcctaaaacattcaaacaactatatttagataacaatagagatatagatggtatattctattttattcaagaattagcttatggtggagaaaaatgtgatgaaaagctatctgttgaagaaataatggaattaagaaataaagatttattttatctctatgtaattacttttgttggttatttggctatttataccattgaagtagaagataaagattttaatgagtatacttatgaagaactttttaatatatctgaaagagatatattcgtagcttgtatactagaaaatatggtaaatatatttggagaatttcatttaagtagagtatttccattatatatgggtaaatcaattttaacaggtttagatagtcaaaataagccaatctataaagagggtagtataatgataggtacagaggaggaaacgccaaaatgggtatgctaaggctttcagaattgaaattaaaagatgagatgagaaaatattttaatcttagagttgaggaattacaaaatagagtaagacaacttagattaaaaaagaaattttatatattaacaaatgaaaatgataaaggttgtatgctatatgcaaaacatagaatggcttttggacaaatgttaggtttagaagtagtagcaatacctattcattctatgcaagatttaaaagatgtcctacgagatataaacggcaatagactaccttgtatgctagatatgccttgtgaggataatatttataaaacatataagaaattagtagcaaaaggattagatgtagaaggtttagatgtttcagaatggctagatacagataattatgattatgcacctgcaacaccaaaaggaataatgcaattcttagattggctaaatatagaagattttgaaaagaaacaaataactataataggtaaaggtagaacagtgggaaagccactaatgaatatattaactagatattataataatgatgttatgtgtgttaatactaactcaagttatgattatatgatgtacgcttgtaaaaattcagatattattgtatgtgcaagtggtgtaagaggtagtataggagattttcatacaagtgatactaagaatgtattagtatttaatgtaggtacttgtgtttataatggaaagttagttaatgaatatcaacctgtcaaaaataatattcaatatacagatacaaaggatagcgtaggtatgctgactttattagcgttatttgatacagtagttaagagagtggaggattagacctatgaaaaagtttagagaaatagatttacatagttacttagaaaaatataattttcaaaataagtttttaaatcttaaggaaagaaatgcagaaagatttgaaaataaatataaaaagtttggattagatagaaatagatatacctatgatgaattcttattagataaaatggatagtataatattattaattgaacattgtcaacctttaatagataaggaatttaacctaataagtaatgatactagaccttttagtatagactttaaagttaataatctcatatttgaccttaaaagaatatttttcaaaacaaatattttaacagatgaaagtatttattatgaagatagaaagaaattaaaagaagtagttatattattatgtcaaaaatatcaagaaaatattaaatatcatataaaaaagatagaaaatatatttgatgaattagaaattgggttaaaatataataaagaattagaagaatatttagaaaaggtaggggattagttatatggatttaaacaaagaattagatttattaaagaaagaaaatgaagaattaaaaagtagaattaaagatttacaagttatagaagatttattttattggaatgaaagacaacctagtacaagagaaagtattattatgatattaaattctgtatatgaggataatactgttaagtatgtggaaaagattaatgtataccacgaaatatatacagagttaaaaaatagatttaacttagatttattaagtaagtatatcaaggctaggaacttaaataagacacaaactcaaagtgtattagattatacttgtgaacttaaatatgatgacttactcttagacttaattatatatttttatcctaaaaatgctaataaagttttaagatattcagatattttatttaatagagtttatgctagagtatgtgaaaaatttagagaagagtagaacttatctactctttttattttattaaaatttttattgacattttattttatttatgctataattagttatcaaaaataaaaaggaagtggtgtaatatgaatgaaaaagatttaagttatgatgtaagagatttacaaatcgcaatagaacattgtaatgaaaaggtaaatactcttaaaggagattgtcaaaaagagcattacaaactcttaatgatgttattagatttgaaggagtataaagtacagaataattatgaacctaataatatctatacaattaattccttgaatgagataagacaaataagagaacaagcaaaatgcagacaaattttaattagtaaatttaatttattagttaaaaaattgaatgaattatttaataaagcaagtttagaattagattgcaaacaagagtatttagttatccgagataaagacaaggaatattggtttgattatacttttatagataataaattaaatttaattctaatatctaaaatagatacaatgaatataaaattatacaaaaaattaagtggagtatttgaagatattttaataacctgtgataatttagaaatagatgtggtatagatatgttagatgtatattatcaaataagattaacattatatttttcaaaattaaatttaaagaaattatataaaaaattagaaattaatcaaaatatattaaatgataaatataataaatatgaaatggcaaaaataatggctaatgatgatagatttactgctttatttttactttctaaaaaagactatatgaaacaattagaaatagtgaacttattaaaaagaataattcaagataaagaaagaaaaataaatagagattaagaaaggagatttaatgaaattagatgagagaatgaaaaagtatgaatatgttactagacattatttaatgtgtagaacacctgttattgtaagaattgatggtaaagcttttcatacatttacaagaggtatgaaaaaaccttttgaccatatatttatgaaatctatgcaagacacaatgaaatatctttgtgagaatgttcaaggttgtgtattaggttatactcaatcagatgagataagtttactattagtagattatgaaaacttagaaagttgtgcttggtttgataataacctaagtaaaattattagtattacatctagtatggctagtgcttattttaatattatatttagatataatgttgagaattgttgctatgatatgaaaggaagtgcagaatatagaactttactaagacaaaaaactaaagatttaacagtatttgatagtagagcattcaatttacaaaaagaagaagtcaataattattttgtttggcgacaacaagatgctattaaaaatgcaatacaaatgataggtagagcttatctcactcataaagaattagagaataaaaatggaaaagatataattgatatgttggatagtataggtgtaaattatcattcatttctgacttgtgaaaagagaggtagttgttgtattaaaacagaacaaggttgggtaatagataaagaaatacctatatttaaagacaataaagattatattgaaaaattggtttatattggagagtgataaatgtttaaagatacatacgaatacaaattatataaagaagagtacttaaataaatctcatgaatttttagagaatgagttaaattattatactagaaaaattaataaattacaacataaattagaaatcaacagagaaaatatgacttatctcaataaatacttaaatagattatctgaaagaaaatatttatggaaaattcgtgttattaaagaaatattagatgaatatgattctaaatataggttaggaagcgtgttataaatgaaatgtagtgtttgtggtaaagacatagagggtaaattctataaggtatatcctacacaagaaaatgaatattatacaaataatgatactctatttgtatgtcataattgtgttagagttagaacagttaaggtatttaaggtaaaacaggggtataacttgcaagatttagaatttacagaatataaagattgtgatacttatgataatccttttgtatatgaattaagtttaatagatagaattaaaaaaattaacttaaaattaaaagagttaaaaggcacttggagtttaagtcaacgatatttattagagaatgaattaaaggaattgttatatgaattaaatcagttagagaatgggagtgatatgtaatgcaaaaaggaattaaattaggaattttaggtggagtaggaatcattatattagctttattgttttggaatgggtatacagtagatacaggagaagttgctattattagtaattttggtaaagtatctaagatagaaacagagggattacattttaagataccttttgttcaaagtagaacttatatggaaacaagagagaaaacatatatctttggtaaaacagatgaaatggatacaactatggaagttagtaccaaagatatgcaaagtataaaattagagtttacagtacaagctagtattattgaccctatgaggttatatactgcttttcaatcaaaatatgaaagtagatttataagaccaagagttaaagagatagttcaagcaactatttcaagatatacaatagaagagtttgtatctaaaagagcagagatttcaaaacaaatatatgatgatttaaaagatgattttgctttatatggtctttcagttagtaatgttagtttagttaatcacgattttagtgatgattatgagagggctattgaaaagaaaaaggttgcagaacaagaagtagaaactgctaaagcacatcaacaaaagttattagtagaacaagaaaataaagttaaattagcagaatatgagttaaaagaaaaggaattaaaggcaaaagctaatgctattgaaagtaattcccttagtccacagttacttagaaagatggctattgaaaagtggaatggacaacttccaaaagttcaaggaaaagatgctaatacacttatacaattagattaatataagagatagagtagttgtttggctactctattttattattttttacttgacataaatttacttttatgctataataattttaaataaaataaaggtaggtggttaaatgattttagtttttaaaatattaatattattgttaggaattattttagatataactgctataattaattttgttgcaggaaaatctgagaaagagagattatatagtgttattctaggttttgtaggatttgtaattactagaattatgtttttacattttttaaggtaggtggtatatgaaatttgattgtttaggagaaataacaaggagtaatattaaattaattacaaggggagaattagcttattatggtttaactattaaacaaatagattttattaacttagataatggttggaaatttgaaatgctgatagaccaaacacaagatagtttatatgttatctatgataggaatacatttactgatatgaatttatataatcaaataggtgtgtattattgttattctaactttaaaaaagaaaatgaaaagtattatgataaactaagagaaaataatactattcaaaaaattaaagatagaatacttaaatttttatgtgatgttgcttatcacagtgaattaacaaccattataaactaccaaactatagataatttaaggttgctatgtaaaaatgtgtatgtaatttatgaaaaagataataattttattattcagcttatgaaagaagattatactatattcgcaagtatttatcttagagtaaaaaataatggaaaatacactttaaagtggacagtagaagaacagaataatttaacagatattattcaaactcaacaagagaatactacacttgtcagtcatgttatggtattaaaaactttatttgaaagaaaggggttgaaatatagtgaaaatttttaatatatggggtaagttgccaaatgtatttgtaaaaacttgggagtgtggagaaagtgtttattataagactgttttagtaaatggtaggtatagactttataaattaatttatagatactctgacagttatgagattactagatattggaataatgataaagccctaattggtaaagttaaggaatattgtggaattaaaaattaaatcaattttaaagccattagaggtactttaaacgagttttataaattaggtatataattagttacctgtggtatataaaattagttttaaggctatgtggtggcttataaataaattttgaaaggaagtgatagcaatagaaaagaaaataatcagagaatttaattgtcaagtatgtggtaaattagttcaaatagtagataaaaatgacaaaagaactaaaaattgtagtaaaaaatgtatgacaaaaagtttaaatgatagacataaaacaaaatataaaagaataccaaagactaaacctcttgtttctcaaataagaaaagtaattaaagaagaaaatagcaatttatattattttattgagaatggtgtaaagtttagatgttcagaaaatggatataagaaaagagagttatttgatgaaaaattattaagtaaaaaaggaaaaggttggagtgagtctgattatatagaattagttggattaaagttaggaaaacttcataaagataaagacattgctttattattagaaagacctattagtgctattagacatagattttatcttttgaagaaacaaggtaaaatatttttatacttagaaaagtttaagaaaggaggtaaaattactgaataaagataatataataaaagtaagtatatttattatttgttcatttttagtaagtgtacttgtgtggctacctatatatttaacaacagcaatactattagcttatataggaatgttattggagagtattaattttataagtaaaaatactttaatagcatatttacttagtgtaagtaagatagttagtattataatttctgcatatataggaatatcctcaagtaaattaattcttaaagaaaaataaattattgacatatagaaattaaaatgttataatattattattaatataaacaaaggagttgatataattgaaaaaagcaaaggaaacagattatcaatttatgtgcagacaagtagataagtgtatagaggaattaaaagatttaaaaagtattcaaactataccctatggagctttgtatacacaagagagaattaaaggcaatatttataaatctaaaattaaacgagttagacaaactattaatgcttggttaaaacaagtagaattgggagaatggaaactaaaaaagttagggttgatagaagatgaaaatattaattagttgtgtaataggtaataatcctaatgctattattacctataataatattagaagatatgtacttaatgtagataagaataaatttctatctaaaagtgtagaggatagacttgcaggattagatttaatgtgtaaagcagaaatgaaagtacaaggtaaagtcaaggtattaacctatcaaatagagagtgatgactaatggctagtaaagtatatgcttggtataactctaatttagataatggaattgacaaagattggaatacttgtaaagaaagaaaagcattaaggtataagtcttttaaaactctacaagaagcacaagattggctagataatggtgctaagtatgataaacctcaaatagaattaaatgagggtgtatattttgacagtggtacaggtagaggaagaggtattacagaagttagagttacagataaggataaaaatagtttattaaaacatcttattacacctagatttactcaatggttagatagtttaggttggaaaataaatgaatttgataatattgagttagatatacataaatctaataattatggggaactattaggattatatttagccttagaaattgcaagaaaattaggttatacagatgtgtatggagatagcaagttagttatttattattggagtaaaggacaatataataatttaccaaaagatacagtcaagttaatagaaaaagtaacagagaatagaaaaaattttggtggaaatattagatatattaatggagattttaacccagctgatttaggatttcataaataataaaattttcacttgacaaagttaattatgtatgttataatggttatacaatataagaagaataagaacacttactatttcaagtgtgagataaatttttgaaaaggataaatatgaattatgtaataactttaacacttaaaacagagatatggcaagaacatatattagaaaagagaagtaatattggtagacacatatataattgttgtcttaaagagattatgaaaagatttagaaaacttaaaaaggataaagaatatagaaatataattaattctaatgataaaaagttaaaatcatctatattaaaacaattagatgaaaagtataaattatctaaattttctcttaataaatttgtaaaggatatggctataagatataataaaaatattgggtcgcaaatggcacaagaaatatctgaaagagcatatagtgcttattatacccttagatttggtaatgctaaaaatgtttactataaaaagtatggagaattttattctcttagagagaaaactaataaaacaggtttaagatatgataaaaccaacaatacagtaacttggttaggactcgttatacctgtaataataaagaaaaatgataaatatatattacatagtttaaaagataaaataaagtattgtagattgattagaaaagaaataaaaggtagatataaatattatatacaaataactattgatggagtaccacaattaaaacatttagtaggtactgatgaggtaggaatagatataggaacatcaacaatagcaatagtaagcaataataaagtaatacttgatagactagcttatgggttagataacattgatagagaaagaagagtattacaaagaaaacttgatagaagtaggagaagtaataatcttaataaatataatagtgatggtactattaaaaagtctaaaactaaatggatatatagtaataattataagaagataagagctaagttaaaggagatatatagaaaattaaaagataaaagaaaattatctcataataaattagcaaataagatattagaattaggtataaaagtaaaagtagaggatatgaactatcaagcattacaaaagagaagtaagaaaacagaaatatctgaaaaaacaggaaaatacaagagaaagaaaagatatggaaaatcattattaaactatgcacctgcaatgttattaacaatactagatactaagttaaagtattatggggaaagtttaataaaaatagatacaataaaagttagagcaagtcagtataatcatataacaaataagtaccaaaagaaaaagttatatgaaagatggaataaattaggaaaggataaagtacaaagagatttatatagtgcctttatcataaagaatgtaaaagaagatttaaaaagcatagatagagaaaaaatatttaaagaatacaataattttttagaattacataataaagagatagaaagaataaaaaacagtgatataaaaactttaaaatgtatgggattttaaaagagatataaaaggttttgaaccgagcctacaagatgtaaatgttctcattggagagcttgtctatgaaagtcttatggaataataattagtgaggtaacacgattacatagttacttagaaagttgtttagtacataagaaccctgcctatttatatgtgggaggttcagcaaggaagtaaaaatagattatcaaaactatttgtaataaaagattattggtggaaaggggttgagctatgaaatatttaatttatactggaatgaatgattatttatatgtaaatactttaaaacttcaaagtagaatagtaaattatattttaggtaaatttgagtatgaatatgatattgaaggcttaatttatgatgagaatgaggatacttataaggttaggtttgaatatcaacataaattgcaagagtttttagcatttataaggaatactcatgaacatttatttaaagatagtttagaagatttagatataagtacagataaattaggatatactttaaattcctatttaaaccttcaacaacaattatatgattgttatattgatatacaagatattacttttgttttaagtttaggacaagattgtgagatagaattttatggttactaaaatattgttcttagattttgatggagtggtaaataacataggtactagaagtggtatggggttaaatataccttttaaatgttatgatggtagtattagatatactgattggggatttgagaatataggggtattcaataaattattattgtggtgcttagaaaataatgtaaaaatagtaatatcatctagttggagaatatgtatggggtatgctcaagaatttaatgaattttttgatactgtatttcacgagtattcttgggtaaagagagtaaattctttggatagattagttatagatactacgggtaaagctagaactaatagagaacttgaaattaaggaatggttaaatataaataaatatactggaaagtttgtaatattagatgatgatgtgtgttatgataataaatattttaaagataaacatatagttaaaacaaataataaagttggtttaactaaagcaaaattagaagaaataaagagaaaattaggaggctgatattgtggaattaacaaaagaagaacaagaattaattttaaaaatgagaggagaaaagtcagtagagaaagaatttgatattgctttaacagcatataaaaatggtattaaaaatctaatagaagtaatagacaaattaaatgaatattctaaccaagctactgaaaatataaagaaaagattaaaaaaggatgaattttttgatatatgggattttataggtctaaatatagctttagatggatatagagaatattttaataaagataataaaggagagaataaataatatggcaggtgcagataaaattttagtaataggtagttcaagttctggaaaaacggctagtttgagaacattaaatcctaaatcaacagttataatttcttgtgaaaaaaatagattatcttttaaaggttctaataaatttttacaatataatataactaattatgaaggattaataggtgtaatgagtgaaattttgacaaaagataaaaataaaaatgttaaaactattgtattagatgattatggttatcttatgtcagatgaatatatgaaaacagccttagaaacaggatacagtaaatatactgtaatggctgttaatgcttataatggatttaaaacaataccaaaggaactttgtgcaggaagagaagatataacaataatctatataatgcaccctcagaagaatgatttaggtatgtatacaccaaaaacaataggtaaagtattagatgataagatttgtattgaaggtatgtttgatactgtgttatttgctagagttaatgataataatgagtatgtttttatgacaagaacaacagtagatataccctctgtggcaaaaacacctatggatatgtttgaacaagtagagatacctaatgatatggatttagtattaagaactcgtgcagaatattatggaacagactatgtaggaaaagaagactctaaaaaagaggtaaaataatacttgtaattttataaagatatgatataatacttttaattaagtgttatgtctatcttaaaaggcattataaaattaatgttttgtaagatagacataaagaaagagaggtgaatcaaataaaatggataagaaaactttaaagggtataattgaaagtatatgtgtaagattagaaattaattctaaaatatgtgaggagttaaaggcagataatttaattattattcaacagttaaaagagttatttcctaataaatattattattataacacaatattagaaaatgaaaatccaatatcagaagaacaattagcaaatgattataactttgaggtatctacttttaaagatttattaagtaatttaggaattgtagataagacaaaaaattattacatattagcagaaaaatatcaaggttgtaattatattaaaagtgaattaaaaggtaatgaaattattagttattggactcaaaaaggtagattatttatttatgattttttaaaacaaaaaggaatattaccaacaatagaaaaagaaaatatagataaggagtgatgtgtaatggcagtagataaatcaaaattaataggaaaagtagatattataggtgtagttcaaggaatagaacacccaacaaagaatgaagatggtaaacaagtagaaattaaaactattgtaaatttaatagtagaaaatccaataacaaaatcaacagtatctttaccattttttactaatgaatgggataaattacaatactttgataatggacaacctcaaagagtatcagaacaaaatgcaacagaggaaatgaaaagaaaagctattaaatatgaaattaaaggacaaaaagaaacaaaaacatatctaacagtaaaatcttttgtggatgctttaaaattatttaaaggtaaaaaagttaaaatagagggtacaagtagatatagggttaatacacaaggatttttacaacaaactttggaatgtaaaaaagtagagtttatagaccaaaaaactacagattatagattacaaactcatacttatgttctactatctaaaaaagaaatagaaattatggatttagataaagagttagagctatatgttccacttggtactcaaaatgaatattacagacaaaaagcaataattccattagaaatatttttagatggtgctttaaaaattgatagacctttggcaaaacaaatattagatacaatgagaaatgattgtgctaagagttttgaattagagggatattatctaattcctgctacaatagagttagaaaatggtaaagcattcagagaacctactgaggatgatgtaacacaaggtgttagacttttacaccaagctacaagtaaaggggatatggagttatataaacaaaaaatggctttagaatttaaaaagattggattaattccagttgagagaggtacattaaatattgctattatagcttttgataaagtagactatgtagaatacccaagtttacaagattattctactaacacaggagctaatgcaatacaaaatgctactcaaagttcaatgcaaaaagccttagaaactatgaaaaagataaaggaaaatacaatacaacctattttagtaacggaagaaacaccagaagaatacattaaagaggaagttaatactgaaagtcagggttcagaggataaaaaagaagcaacaactaattcaataactgaaactactgagaattcaaatgaggatatgtttcctttttaaaatcaacaattaaataaagttaattaaaaggtaggtaaagttatttacctaccttattttactaataaaggtggtgtatgttttggcaagaaagaaaaaagataaaagtgtagaagaaataaataaagaaatatatgagaatttattagaatttttaatacaaggtaatagaaaaagtcttaatgcaaagaataaaaaattattaaaagactttgagaatgaagtagaaacttatcaaaagagaatttattttttgtatcaaatacaagataattatttagaatggaatactttaagtacagatgtgaatgctaattttaatcaattaatatatttaattaatttgaataaagaggatttacatagacaatatattagtccttatgatattgaccctaagtatttaaaaacagataaaagtaagattataataaataaagatgaaaaaattatgaaagactatacagaacttgaaaaaaaggtagggataatatgagtataattgatactaagaaggagataatgcaagtattagaagctagattacttgcaggagtattacaaaatatagataatttcaatatgttagaagaaaagacaaataaaaatattatatttacagtagatgattataaaaagttttatgaagtatgtaagatattatataataaacaaaaatacactaatatagatgagttcgccttatctacctttttaaacactctatctattgatgaaaatagaaaaaaagagtgtatgaatatattttatcttattcaacaattaaatgatagtgatttaattgattttgagggtgttttagaacaatatacaatagttagtgtacctttaagactttatgataaaatagctcgtaatggtgggttagaagagtttataggtaaattaactaactttgataacagtgaggacttgaccaccacaatagagggtatgataagtgaaatttgtagtgtaggaacagctgatagtaattttgtggaaacaaacttaactcaaagtattaatgatgattttattaaaaatataagaagtggtaaaagaatagattgtgtaccttttgatttaaggtatagttatttgaataagtggaataagggtattgtaagaggagttaatggaattgcaggctggagtggttcaggaaaaacagcacttttagtaactatttatattttatccttattagaaaattcaaaagataaagtttgtttattctgtaatgaacaagtatatgaaacttttatacaaatattaacttttgcttatattactaatgtattagtatttctcaatcaaaatgcaaaaacaataagtagagcagaatatggagaaaattgtttatcaaaagaggatatggattattttgtaaaggctatgttacattggaaagaaagatataaggatagaataacacatatatattttgaaactatgcaacctagtatacttagaagagaaataaagaaaaaggttagacaaggatttaggcattttgtttatgatacatttaaggcagatgaagaggaatataaagatattatagagttgtctaaagttgctgataatttaactaaaagatttaatataacttttactattactttacaaatgtcaggagagtcttatggaacaaaatatttaacttataaatgtttagcaagagcaaaagcaatcaaagaaatattagaaaatctaataatgtttaggaaattagataaagaagaacttgtaaatttaatagtaatgaaacacaatgaggaaacaggaaaagaggaagaagtatcttttagaatggatgtaccttattatgcagtgttctgtgataagaatagaaatggtagagatggttatgtattattatactatatagatttagatacactttattatgaagaaataggagttattcaaaatatgccaaaagatacatcaaggaaaaaatcctcttagtgagttgatttatggtactagaagatattgtattacataaccttaacttaaatagagaaatattatatagtcttttaaatacttatgtaggtaaattaacccctagttctgagggtactactcttagatttgatatatgccatagttcaaatgcttatgttctttcattagatgatagtttaagatattataattttagaaataatgaaaaaggtaatattttagatttgttaagtaatttagagggcatagataaaaataaatatataaatcagttatatttatctttaaattcaaataataaattagttaatgaatgtggagaaataaaggattggaatgaaaactatatctaccaaatacctgaaatatataataaagaatgtttagaacaatacccaaaaattatatcagagatgtttttaaatgatggtataggaatagaaacacaaatattctttgatattagatacgataaaagaactcgtagagtagttattccagtattctacaacaaagaactaataggtgctattggtagaagaaatgctatacatttacaagagaaagaaaataaatatatgccaattcttagatatagtaaatctttagtgttttttggttatgatgtatactatgatttaatccaaaagacaaaaatagttatgttagttgagagtgaaaagtctgtaatgaaaatgtggcaaatggaaagtaaaatacctacattagcattaggaagtaatgcactatcaagaaatcatatagaaatattaaaactcttacaggtagatacagttatatttgcactagataaatcattagattatgtagatagtcttattcctaatattcaaagattaaagaaatatggtagagaatgtaagattaaatacatagatgtaaataatataccaaataatttattaagagaaaaagaagctatttgtgatagaaatagggaagaaattacagaaatatttacaaaatatttaaaagatgaaaatttttagaaattccacttgacaaggtggaatttttttggtataatatggtgtaatgcaaaaattatattttaaaataaggagttgatatatactatgagtaacatagtaaagattaaagaaacagaaatattgataaaggagtataaaggtcaaagagtagtaacctcttgggatatttctaaggtacattgtaaagaaaacaaaagagtaaatgaagtttttaggaataatcaaaatagatttattttgggagaggactattttttattaactactaaggaattttctgagtcgtttaaaacgattcaagaatttatacctaataatgtcaaagaaataccactatttacagaaagtggatatatgttattaactaaagtatttacagatgacttaagttgggaagttcaaagattacttgtaaagagttattttactttaaaacaattacaagaagtaggttcaaaagaaaaattattattaaatattatgttatctaataatgatattgaaaaagcaagtgctattaatgaatacgaaataaagtatgttaaacccttagagaaaaaaggagaatatgtagacaatgttttaaactccgaaagtctattaactacaactattataggaaaagattttggattaagtgctaaaaaacttaatgaaatattaaatcaaggtaaaattatttataaacaaagtggtacttgggtattatattctaaatatcaagatttaggtttagcacaaacagtaacaactgaaaaaactacaaaagagggagtgcaattaacttttcatactcttaaatggactgaaaaaggaaaacaatttatttataattatttaaaaaaattaggatataaattagctgttgaggtgtagttatggaacaaacacctcaagtagatttaataaaaaaacataaacaatggtttaaaaatttaagtatacatatagataaattttattttggtatactgaaagatgatttaacaaaattagaacaaatatatatggggggacttgtaaaaagtggttatttcaccgaaacagtacaaggttatttattaactcttaaaggacaatctgaattaggagtaaatcaaaaacaatcagataaagtaaaggaattaaaatctaataaagttaagttatggagttttagtgaattagaacaatggaatggttgtcagctgtcttataagttacaaagaatagatagagtaccacaattacactcttcatattcattctatggctctctagcacacgatatacaagagagttatgtgttaggtaatataagttataaggagatgatagaacagtttaaaactaggttagaaaggcttaaaacactaggtgtacttttacctaaagatagaaaaggtggattaactattcaagaaaattatgagaaatgtttaaaagattattttagacataattatactgaaattaccaaagacattagagttgaggtagaggtattaaatcaaataggagaacattggatattaggctatattgactatcttaaaattaatagaaaagagaatggaaagttttattaaatagtgcaagaacactcgtgactttagttgtgagatgaattgcacgaaaattttagtaagcatatagggaaacttgtatgtagacacggagcaaaaccgtgcaacaaagaaactgaattgctgggaactcttaaagctagtataaccacaacatagcaatcttaattataagaggcaaatgtaaaggtagcgaaagcagaaaaaatatactagatggtgcaaggttaaatcctaaacattatgataatagacaatcagcaactaagcctgaaaaggaaagttcaacgactatccctcgtgaggggagtacaatacaagcgattggtattggaagtggtttcgcctaaggtgttgagatacactatggataagatatagtctgtgcttgttagagataacaagaagttcataagagaactgcataagtggtagcgtacttatgtgaacgacacttcttaaaagaccaaagtaagagagttacttatggttcttataaattaattataaaaacactttacttttggattagaatatgttataataattattataatttaaaaggaggtgtatttcacattggaaaaaacatataaatttagaatatatcctaacaaagaacaaaagatattattagcaaagacttttggttgtgtaagatttatttataattattacttagatttaagacaaaagaaatggaaagaagagcaaataacattaaatttttatgactgttctaaactactaacaattttaaaacaagaaaaagaatggttaaaagatgtagatggattttctttacaaaactctttaaaagatttagaatttgcttataaaatgttttggaaaaagaataatgggtatcctaagtttaaaagtaaacatagtaattatttttcttataggactcaattttgtaataataatattgaatttctaggaaatagtattaaattacctaaattaagaaaagttaaaattaaagataacactttaaaattacaaggaagaatactcaatgctactattacacaagtacctagtggaaaatattatgtttctattgtttgtactgatgtagaaatacaacctttaaagaaaactaataagaatgtaggtattgatttaggcattaaagaattagcaactttaagtgataatactaaatatgaaaataaacattatttaaagaactcacttaaaagacttgaattattacataaaagactaactagaaaaccaaaaggaagtcagaatagaaataaagcaagagttaagttggctaaactttatgagaaaatcactaatcaaagacaggactatttacaaaaaataacaacagaaatagttagaaaatatgatgttatttatatagaggatttaaaaatatctaatatgcttaaaaatcataaattagcacaagctatttcagattgtggttggtatacttttacagaaatgttaaaatacaaatgtaattggtatggaaaacaattaattaaagtaccaactttctatgcaagtagtcaactatgttctaattgtggatataaaaatgaaaatgtgaaagatttaaaagtgagaatatggacttgtcctgtttgtaatgaggtacatgatagagatattaatgcaagtaaaaatatattacaaaaaggactagaaatattaaataattaatttataagaaccataggaactatgggggtagaccgctcaatatatgtggctagtaaaagcacatacttcgtggtaatctcttactttggtaagagaagttcaggtagatattatagattttaaaacatctactatatattcaaaagaagaaatgaaagtaaaagcaagacaattaatattatataaaatattattagaaaaatcttatcctaatataatagtagagaacttgggatgggattttatgaaatatgttaatatttattttaatagtaaaccatctaggaggtcaagaaaagataattatatagaaccttattatgaaaagttaataaaagaacttggggaggatatggacaaagaaattcagaaatggattagaactaagactatacctcaagagtatcaatatttaattaatataaaaaattgttatgtgtattattacccaacacaagaagatatagatgaaattactcaatatgtagagaataccacacaagaagttaggaatggtatagaaaagaatgaatttactaatagggattatgcaaatgaacaatttttttgtgataatttgtgtggctttcgtgaaaaatgtcctattataaatcactctaatataccacaaggaaaatcaatgaatagtattttacaagatatattaaataagagaaaggaaggaaatgttagaaaagaataagaaacaaatacatattgtgagttttagtggaggcaaagatagtacagcaatgcttctaaaaatgatagaaaataatatgcaaatagatgacataatatttttagacactactgttgaatttccagaaatgtataaacacattgataaagtagaaaaatatataggtagacctataacaagattaaaagcagagaaagattttgaatatatgttattacactatgaaaagaaaaagggtaagaataaaggacaaaagggttattctttccctgattttagaaatagatggtgtactaattattttaaaaaatcagttattagaaaatatattaaaaataaatataaagattgtgatattatagaatatcacgggatagccatagatgaaacagaaagattaaacaaaaataaagaaaaaattattaagtatcccttagctgaatggaatatgacagaaaaagattgtttaaattattgttattctaagggttttatttggaatgggttatatgaaaaatttgctagattatcttgttggtgttgtcctttacaaagattaggtggattaaaaattatatatttagaataccctacactttggaataaactaaaatattggcaagaaaacacatatagaaagtttagaagtagatatacagtacaagaattagaagataaatttaaaaaagaaatagaaaaggagaaagcaaaatgaaacaaatagattatactttattagatggacaaacttataaattagaatttaaaggagggtatggacatagtgtaggtatagatgtggcattagcagaagatgtagagttacattatggagagtttaagatatgttcattaggttttactatgaaagtacccgatgggtataaagcagatttaagacctagaagttctacatttaaaacttggggagttattcaagccaactctgttgggctatttgaacctagctatagttcaacttcggatttatgggctattccactttttagacctttagattataaagctatgaaaaaagtaatagaaagggataaatcaatattagatgatgttttagttattccaaaaggtactagaataggacaaatagaaatatttaaagcacaagatgaaatagagttaaatttgatgtctaatgaagattatgccaaaaaacatccaaatgttagaggtgggtttggtagtacaggtactaaataaggagaactaatgaaaatatttgaaatttataatgaaaatttgaaggaaactttttatgtacatagtttatatgatttttgtaaatttaatggtttgactgaaagattattaagatatacacaccctaaattaaaaattttacattatgaaaataaaaatgtgagataccaaccttatcataaaggttttaagatagttagagaatttaatgatgatagaatagttaaatcagataaagaaaaacacaatgtatattatgtagttgatttaagtgaatactattatattccgtatgaggaacaattagaggatgcaattaaaaaagcaataaaagaacagaaaaaacaagcagatactaatagtaataaagaaacttatgattttagtaatttaggaactgaagaacaagaaaatactacagatgaatatttagttaagaagtatcaagcaagtttgaaaacaatacaaaaattaagagatgaaaataatttattaagaaagtcagcaagagaaacctttagaggagaacaagccttagaggaagtaaaaacaaaattatattcaatggcaaaagatttaagtgcattagattttattgagaattggggaaaagaaaaaaagtctattgaaactaaaaataataacataggaatcttagtattgtcagattggcatataggtaaattagtcaacttagatggaaataaatttagtgaagatatagctgttcaaagacttaataaattatacgaaagagttagagaacaaatatatacttatgaattaactgaactaagagtagttttattaggagattttattcatgcacagagtagacctgatatgaaatatcaaggacagtatgttgaaattgaaagtggacttaaatgtttttatcttataaaaaatttattagataaactttataatcacttaaataaaatagatattgactgtgtagtaggtaatgaaagtagatttgatagtgctaaccctcatactaacttaaatgaagtagctaagaactcaatagactatatgatttatgaaatgttaagtttagcttataaagaaaacaaaggtattaaattacataaatcagataattattttgaaaatttaataaatatagatggatttagtttattagctattcatggggataaaattaatcacacaaaattagaaagtgaattatcaaaattaaaatataaaatataccaagatactagaaaatctgtggattatatagttatggggcatatacacagtgcattaattacagatggatatagtagaaatgcaagtttagttggagcagatgagtatgctacaagaggacttaatatacctgaaagttatgttagtcagttatttggtgtacttaatagagatacaaaagaattaataatgtttagtttgaaattaaaataatagaggagagattatacttgcataaagaaaaagaagaaataaaagaagagaaagataaagagtatgtagttccagagtcagagataatatttaagaatattaatttaatgttgtttgattttgatacatataacgacgattttaaattcacccctaatttcctagcaatagaagaggattttcaagatttaatagatagagcattagaaaatagattagtatatgtaaatattgattactctagttatggtggagatttaatggtgttattagccttatacaatagaataaaacaattaaatgctctaaatattcaagtcaacattaatattgtaggggatttagcgagttgtggagtgttcttaatattaatgttggcaaaagataaagtatgtacttttacatttaatcccttatttacaccagtatatttggtacacgaaggctatatgagagcttatactaatagtcttaaagatagtgatagttaccattatcaagccaataataatttaaaaagtatgaataaacaattattagatttattacaagaatttgtatctttaaataagactgaaataagtaaatttaaaagaggtaaagatattttcttagaacacaaagatatttacaaagccttagagaaaaaagatttaatacagaaagaatttcctataaaggcagatgttatagaatttacaccagaaaatatagagaaaaataataaaaagtaggcattttacctactttttattttatacttgacaaaataagaattgtatgttataatgaattatcttaattttaaaaggaagtgatagaatgaaaaaattaatattattaatatgtctactatgttcatttacttgtttagcagaagaaaaagaacattttgacataatagttaatcaattatttgaatttgaaggtagaaaattagttaaggctgaagatggatattcaaaatatggcttgacaaaatattatacaaatgatataatagggttgactgaaacaaaagctaaaaagattatatatgataaattatatggtaaatatgatttagatagaattaataatctagcaacaaaacattttgtatttgatttcttgtataatacaaatcctaataaagctataaagataattaaaaaagtttgtaaaaattatgatgaggagattaatttagaaaattatactttatctgataaagtaattaatgttttaaataataatccccaagtatttgaagaattaatacaagcaagattaaaatatcttagaggtttaaaaatgtataaaaaatatggtaaaggttgggaaaatagagttgattggtttactataaattattcagagtacattaaggagtatcaaatacaaagatatattaataattttatgtttagtgtaagtgaggtggtaaaatgttcattggaacataaaaataatgaatataacagatgaattacaatcaaaaatagtagatgatattaggtataaattactttctcattttaaagtagataattttagtgtagttattgcttggtttaaagtagaagagttatataaatgtttttattgtgataattcacataatttaagtaatcaaataatagagaataatttagataatattatattgaaattaaaggaaattaattgtatggaaactatggagagtaaataaaaatgacaacagatatgttagagttaggtgtatacaagctatttgaggaaggtaattatcaagcattaataccaagagttcagagaaaatttaaaatacatgagtgtgatatagtagttgtaacaaatgatgactacatttatgagattgagttaaaagtgtctgtgtcggattgcaaaagagatagagaaaaagaacatcaacacaaagatttatataataggttaaaatatcaatattttgctttacctagttcaatagtagatgaatgtatagactttatacctgaacattttggtataatagttattaatgatgaaactcttgaaggttctttcataagaaaagcagaaatgaataaaaagcatagaagaattagtaaaggagagttaattaatctattaacaacaggatgtaaaagatattttcaaaaattagatagtatatggaaaaaggaagatgatagtgatgaagaaacagaagaatgagatattaatagatgggaattttattttagatattttatatttaggaatgatagggttatattatttaggctacttagaattagactggtattctcttggatactggacagttcatatagttggtttattatgtttattaagtttagtatcaaaaatcataaaatttatttataaaagattaaaaaagaataaggggagtgatgtttaattatgattgaaattaatttaaaattaaaagaggttagaaataaaacaaactatataggaaagtatttcaaagtagtagcagatgaacctactaaagagttgataagaaaatatataagtaaagttaattcaaagtatgagagtgaagagggttatattaattgggacttaaaaaaagatatattagaagaaaatccttttacttttgtattctttggagagaaagaatggttagaagaattagactatttaaaaaaagagttacaaagatttgcaaataaggaagaaaaattaaaagaaaatgaacatcatactaaacctaataagaataaatccaatgtgggtagtattctaaaacctaaagaagaacctaaaaaatatacaggatatatagtcaaattagatttaacagatgtagaaaatacttttagaaatttaatagaagaatatactactgaacttaataaacctaaatatacacaagagatagattttgtaaaaatgttagatagtattaaagaagcaataaataataaagatgtaacagtagtagattgtatggcttttgtatcagacctaaatgactatttaacagatttagttgcaggtatttataatgcatagtcaaaatatattaatgtaccttgagttaattcaagaaactcaagggattaatgataaaaaagcattattaaaagaatggtataatataaatagttcacaatgtattaaagtattaaattttttatataatcctaatatagttactaatatatctactaaaaagattaaaaaaatatttagtgaacctatgttatcgactgatgatattaaaattttagatgataatatattaatggtcattatgatgtacttagtagataactgtacaggaacagatgaaaatataagagtattacaatcttatagagatttatatacttattctcaatcaaaagaatttttagaattgtttatgtgtaaagaattatctattggcttggatataaaagctatcaataatgttattcctaattgtattaatattattgaacctatgttagcaactaattatatcaatgtagctgataagctagacaatagtaaaatttattatattacacttaaattagacggaaatagatgtataatagataataggaatggaacaataaaagcatatagtcgtaatggagtagaaataaaaggcttagatacctttttaagctgtttaaacttacctagtggtaaaatatatgatggagagttattacctcgtataacagctaataagagttctaaagaccaatacaaagaaattagttctattatgagaacaaagggagaaaaaccaaaagaccaaattacatatcatatctttgatattatagattatgatgtaccttatatgcaaagaagaaactacatagacaacattgaaaatactgaatatcaacaaatttgtccagttttatataaaggacaaataaataatgcagtatttaagttgttagatgaagttgtagcacaggaacaagagggcttaatggcaaatgatattgagggtatgtatgagagcaaaagagtaaaaagtatattaaaatttaaaaagtttaatacagtagatttaaaatgtattggtgttgaacaaggagaaaagaaatatgctaatactcttggtgctattgtttgtgaatataaaggaaatattgttaaggtaggtagtgggtttacagatagtcaaagagattattactggaataatcaagatgagataataggtagagtagtagagatacaatactttgaagaaacacaagataaacaaggtaataaaaacttgagattcccaatctatttacagttgagagagcgaggaaaagaggtatcttatgattaatttagagattaaaaatgataggaatagagtactaatgtatgcattaagatatgcaattagtagaagaagttatgctctatcaggtgccaaagaaatattgttagaatatggtaaagattttcagcctcatttattatattctttattagaggatatacaagaagagattaatagatgtggtactgaaaatatgttaggttgcaaaacagaattaattttaatgcaaaatttagtaaaagaattattgttagagaaaggaattaaagaagatgagttttagtgaagatttagtaaaaaattataaaacaagacaaaaatcaataaaagtaatgaaagaagattttaaaaaagtattaggagtgccttttgaattatataaacaaggcataatagatgcttatacaagtggaaaatttaagtttgatgttagcttaacagaggaacaaaaggtaaaagcaagagaattagatgatttattgtgggattataaagatgaaaccctaagagaactcttagaagaaaaagaaatagcagtaatagtagatagatttctcattagagcttggggagatgaaggggaaatggcttatataactattttcttttcagatgacagtaaaaaagaacaagacaaaaaattaaaagaaaattaaatttttacttgacaaataaaattgaatatgctataatatgataaagaagataaaacagaagtttacagcaattaaatttagttctgattagttgagaaagaaataacttctgttttctctttaaatataattattttaaaattaaagaggagtgatgtaaatgtcaaatgtatttatgaaagaattacaaaaatggggtaacttgactgaaactgaaaatggtgcaatagctgttaaatctactttagatagtgtagtagatttatttggtacaataggctctatgagagagaataattaccatgaacctgctagtgtgaataaggaattattacctatgtttgccaaagcaatgcaagaaaataaagagttagcaatgaaaactttattttatgtaagagattgtagaggtggaatgggagaaaaagaagtatttaaaactattatgttagctcttttagaactagaaacagaagaaagctatttattatttaaaaataatatagctaacatagttgagtttggttcttggaaagatttattagatatatttaatagaactaataactctcaagcaaaaatagatatagtagggtatatttataacactattcatacagatataaaattaatgaatgaagaaaaaacacctagtttattagcaaaatggctacctactataaacagtaaatctaaacatactaagttaaaagctaagaatttactaactttaatgccaaaattagattttgattatagaaactactgtactcaagctagaaaagtgttaaaagtagttgaaagaaatatagcacaacaaacttttaatgaaattaattatagtgcagtacctagtagatgtatgttatttaatagaaatttatttatggaaaaagacaataaacattttaatgaatacttagataatttacaaaacggaaaaacaaaaatcaattcttctgtgttatttcctagtgatattacaggtgcttatttaagtaaaggttttgattggaagggtttttcttgtgaggtagacaccgtactagaagaacaatggagggcacttcctaactatatggataaacctttgaatgccatatgtgtagtagatacaagtggttctatgtgtggagttcctatgaatgtagccactgctttgggtatttatatagctgaaagaaacccaagtgaagcttatagaaataaatgtttagaattttcacatatagttaagtttatagatttttcaaaagctaaaactttaaatgaaaaaatgtgttgttatacttatcaatgtgctgatacaaatatagaaaaagtatttgattgcattttagagttagcaatagcaaataatttaaaacaaaaggatatacctacacatttaattatattatctgatatgcaatttaatagtgcaacaggaaattatactaattctgataggaaatttaaaactcttatggaaaaaattagagataaatataatcaacaaaggtataaaattcctcaaataatttattggaatttgaatgtcagacgacctaattttcccgaaattgcaaaagatggggtatgttatgtaagtgggtacagccctgctattatgaaagctgtattaaatacagaaatgctaacaccattacaagtggttaagaatgcagtattagtagataggtataaaaatgtatattttggataaataatataaggctagatttattttagcctttaacattaatgtaaaaggagaaagtttgaataatataatacaattaaataatagtaaaaatggaatgataacacaaggtaaaatgtatggtttatacaatgcacttagagttagtggctttcctatgcaaatagaaggtaaagttgaaagtgatatacagttacttaacagaggaataaagttaggtaatactcctgtgggagagggacatgataattttctaaatggaataataatacaatttgatggggatttcactaataaatttacaatagaatttcaaagatatcatcataaagattatatttcatctcaaagtttacaatttactgtagcaaaaagagatgaaacattctttgataaatatacttctaagaaagcaatagaagcatttttagaagcaaaagaaaattatttaaaaaataaaacaaaagaaaattatttaattttacttatgtctactcctaatggaatgaaaataaaagcaggaataacaactaatatgaggcaattaaaaactatgtataaacaaagaagaactcatagattacctgaatggcaagaattttgtgattggtgtttgactattccatatttcaaagaattaacaggaataactgaataatattttaggctctgtaatagtgtttaaaatcattctaaaacatttttgatataataagtcgtctaaaagttttgaaagagtttaaacactaaattataaagcttaataaataataattattctaaataatatttaaaggagagataatacggatactaatttaaaacctagaataagaaatttaagaaataaattgtcaacttataaatatgttcattttacttattatgatatgttttggaatgaaaaaatagtaagttataaacaaaaagatttagatatagttttatgtactacttttttaagactttatatacattcattaagatttcatagtaatgtagaacctattgttaatattactaatgttaaattttctaatagacctaatgagaatataaacagttttaataaatcttatagagatatggtacatattcaatatttgaattatgatggaaaaaatgataaaagtaaaaatatagctataatttattcaaaagattatagagttcaacaatttagatttgatttagaggtgtggtataattttaatgaaacaaaagatatgttaaaagccttaaaggataaagctgtaagaaaagctattttaaattatacagataaaaataaaatacctgatgtaattaattatgatgaaataaaacaaaatagtaatgattggagttatttaactaatatattttcattaataaaacccttgaaattaaagaaaaagaatagaaaatataaaatgttaggttaaaattcctaacatttttaatttaggtgttgactttatttattttctatgctataattagattataaaagtaaaagggagttgatatatggataaaagttgtagatggtgtgtctattttaataccaaagaaagaaaatgtgataggttagaaagtggatttaagtttgatagagaaaatactgttaaaactataactaatgaggtagaagatgaagtattatcagaattggctaatttagaacaagatatagacttcattttagatgatgtttcaggtataacctctagtcaaatactagaaataggtactttatttgccaattatagaggtacaataggcaaaagaattagaaatagagtaaatgaagagttagattgggtagagtatgaaggtataaaaactgttacatacgatgatgagttttattgtaaatattggaggtaatatgagtaataagagaaatagaattgaattaagtaagaaaattagagcagactacagggaaaaatatataaaagatttattagagcatatcaaacaaggtttaataaataaaaataatgcttttaaggagtatgttattgagtgttataataaaggagtatatagatgtactttaagtttagatatagatataaaatttataaatcatattaaattagctgatgatgagtatacttctattaaagatatgttcttagaaaatcaatataaagcatttttagcaacaataaataattttattatagaagaatttaatttagaaggatgtatagattctattagtagtgatataaaaataaatgaagaagatttttctgaagaatttacaagtattaatgaatatttgcatacagaaataatatttaaagattaaaggagtgattaaatgtcagaaaaacaaacattatggcaattaacagaacaaggtagtaaattagaggaaatgattgaaaatagcattaattgggaaacaggagaggttgatgagaattataataaattaactgaccttaaagatgaaattaatgctttggtagtaaataaaggtaaagatttaatctatgtattaagaaagcaggacaactatgcagaagctattgatgaagaaattaaaagacttcaagcattgaaaaaatcttatgctaagaaaaaagaaaatttaagtaattatataaaaatgtgtatgattgctaataatattaaagctattgaaacaccagtaggtaaactttcaatagtaaataatgcagaaagtgtagaaatatatgatgaaagtcttatagataaaaaatttatcaaaacaaaagtagaagaaacaatatctaagacagatataaaaaatgcaattaaaaatggagaggaagtacaaggggctagattagtaagaaatactagactagcaataaaatagagagtagatttactctactctcttttaataagaggtataaatggtatataataaatataagaataaaaagatagaaatagataatattaaatttgacagtgaaatggagtttaaattttatcagaaagcaaaagaatttaatattgaattaggaatgagaaaaacttttatattacaacctagttttatatacaagaataaaaagatactaccaataaagtatgtgtcagactttgacataggaaatttaataatagatataaaaggtatgaaaacaactgaatttaagttaaaagaaaaaatatttaagtatcaatatggcaaggagtatgaattagtatgtatttgttcttgtcctaaaaaatacttagataaattagataataatattatatgggaaaaattagaatatatagagttagataaattacaaaaatggagaaaggaggcaaagaaaagatgactaatgaacaatgggcttactttatttttaacactaatgcaatagaaggtaatcaaataatagaaagtgaggtgttaaaactaaaaaagatagcagataaattacctcttgaatattctaaagaagtacatactcaaataataagtaatttcagcaaagataaacaattaagagagtggataacagaaacactaaatgcttggttatgttgtagatatatttatgatacttttgacaatcctataacggagaattatgttaaattcattcataaaataacaagacaacatacaatagatgaagaaagaggttataatattggagagtataaagctattggtaacataattgcaaatagacagacaacagagcctaagaatgtaaaaaaatctatggctatcataatgtcgcattttaacaaattagagtataaaacaagagatagtataatgaagtttcataaatcttttgagaaaatacatccctttcaagatggaaatggtagagtaggtagatatttgatggtaaagcaatgttttgatgccgatatagagcctataatccctactttaaaagagagaaaattttattatcaactatttagtgatgaatgcgatttaaaatatacgacatcttatgcaatgtatactcaatctctaatagatatagaaaaaacaaatgaagaaagaggaatattaagagaggacttatatcaacagtataatagacttgatttaaaaatattgaataaagaatttgatacaagagattttttgttaagagatgtagaacaaggtagaataaaaaggaagagtgataaatatgttaaacctcgttaatttctttatatatggaatgtgtatatttgtattaataggattatattttataggagggttagactaatgactaagagtttaatattagaaagaatatttataggttttataataggaataattataagtatatgcttagtaggtatttatataaagttaattgaacctataataataaattttgcttggaaaaaagttataaaaaataaagaaaagttatctacaaaagaacaaaaaattataaaatatattcaattattttccttttggggtatagataagtataattatttatacgataaagaaagtttactaaaatgttatgttttggtttgtgaggacgtcaatatatgtataaaagataattttaatcaattattgaatatgttggataaaataaaaaatagtgatgttagaaatgatattatgcttacttttgaagaattatatgatatagaagatttatctaaattagaaaacctaaacgattatttagagaataaaattaagtatttaataaattttgaaaatgaattaaataatcaacaagaattttcaaggaagaaggaaattataaataatcttaaagataaattgattaaattaaatcaatctaaactttattctattataaattcctactataaaagtgatataatagatttgtcagatataaataaattaatagaaataattacaaaagatacaaaggatttagagttaagaagttatataaattcaataatattgagtaaaggcggtagatataatgattaaagcaaagaaaagggcagataaagtatatcatttaggaatacaacaatgtaatttagatgtggcaaaattacaattaaaacttaaagaggaagcaaaagatataggagatgccacagaatataatcaagtagttcaaggggtattaataaactatgtagaaatacttaaagatggctatttattctatgtaagttatagaggtaaaagttatatttacactgtacctgatattaaattaacagctaatattactttgaaatttaaaaagaaaatagaccaaatgttagaggctaagaaaaatgaaagaaaaagataagattaaagtaatatgtttttgctctaaaagtggggtaggcaaaagtacaattattgagagttttagagataataataaatttcatgaggtaatatctaatactacccgtctacctcgtaatgaatttgataaaaccactcataattttaaagctatgaaagattatagggaagatttagaaaataataatgtaattgctagttataaagctcctcaaggttattataattgggtagactatacttgttttgatgaaaataaaatcaatctatttgctattgatatttgggcttgtattagattattaaataactcaaaatttaatataaaagtagtttatttgacttgtaacgaagtagatagattaattagattacgaaatagaggtagtgatgtagaacattatagaaatgaacctcacctagatttagatatatatgcttattctaaataccaagataaaatttctattatagatactactaaaagaaagataaaagatattaaagaagaaattataactaaaactctactagactttgaaaactttgaagtgttacaaataaataataattttataattcaaaggatagacagtaaggatttaatactaaataatagtgtatatgaatctaatttagaaaaaatattggattatatacttgaagattataattatattggttttataaaattagatacacatacagagttatatattgaatataaaggtaaaaattatacatactatgattttacactggataaagcaacccttttagattataatagattgattgaaactctattaaaatggaagtgtggtgtaaattatgatagaaattaatgcaagtaatacaaaaggacttataggtaaatatcttgctacttataataatataaaatgttttaaaggagatgtatatgattatgctgaatggtataaagattttatagcaaatatagataatcctaatttagtattagcttttgatatagaggcaaagaagttatatcctagaaataataatataactcactttgccttgagttataaacataatgatatttattataattattgttttgtagtcagagatttagacaaggatttaaaagcaagagtatttaattcattaaataagtttaaatgtaaaatattattacataatgcttattatgatattggcactattaaatttttacataatgtaaatgttaagtgggattttgatacttacatattatttcacactctaatgtcacatagagcaaaagatgatagtgatgattttggagatagtgaagaagatagaggtttagggttaaaagatttcacaagagattatctaccttatggaaattatgaagaggaactagaaaaagaaaagaaaagaatatgtaaagagttaggcatatcagtaaaacaatttacttatgatttgttttctgatgagattatagcaccttataactgctttgatgtactttgtacattacaagcctttgaaataggtttggacttgtttaaagcctatgtaaaggacttaggattgaataaattagcacaaataattaaaactaagaaagcaactatggatatttatataaaggctttttgtagaggtgtaaagatagattatgataaggttgaacgattgggtattcaattcaaagaaacaagggatagaactgaaaaagactttttaaatgcttttaaaaatgaaatagaatggtgtgagagattacatagagttaaagaatatgataaaataataaatgaaagtatgatagattatctttctcatacagcacaaaaaggaagtaaaaaaggtaaaactaaaaaagaggaagatggaaaacattattataccaaaggaattgaattaactcctattcaaagtagaaatttacttaaaaagactgaatttagtatgacttcaacagataaaaagacaactctatttgtagaggttatgggattgaagcctgatgataaaggtacatcaaagtatgaacctattatactgggagaaaaagaagatatatttagtaaatgttttgggtataaattaaatgatactacgggaaagagagaaagagtattaatgactccaaagacagatagaaaatacctagaacagtatgttaatcaacacccacatatacaagatttattagattttggtaagtgtaagactgctttaaataactttttaggaattgaaaaaactgaagaagataaaaagacaatagatggtactactttggcagaattgacagataaaggacaatttccttatgtatatcctagttataatatattaggaacaattacgaatagatgtacttgtaatactcctaacttacaacagatacctgcaagaggagtattagcacctctgaaagagtgttttagtgcaagagaaggacataagttttattatgccgattattctagtgcagagatagtaatacttactgctatcataaatagtagaagatttagtgaagctatacataaaggttgggatttacactcaatgaatgtttggtttatgcaaagaaataaagtattagcacaagcaccagaatttcaagagatgtggaataactgtaaaactgatgatgattataaaaatttctatggagcaataaaagaaaaatttgaaaaaacccttagatatgccacaaaatcagccactttcagtttagcttatggggctggagagcaaggactttcaaagaatattggtatttctgtagatgatgcaaaagaattaatagatgactatatgagagccaatcctgaaatgaaaaagtattttgatagccaacatagaaaggcaaaagaacaaggatttattactaatccttttggtgcattcttaatgatgcctgatgtacctaatgaggataagaaacatgattataatacaaagaaaaagattgaaaagcaaaagaaaaaagcacttaattttcctattcaatctagtaatgcctttttactctatgaaggacttataaaagcagataaaatgattaaagaaaaaggcttagaggataaaatgcactttatgtttagtgtgtatgatagtttttgttatgaagtgtcagatgaagtacctcaagaagaagtattagacatacttgaaaagagttttatttgctatcttaatgatgattatttaggtatagatattgaaataggtacttcttggggttcaactgaacatattaaaagacccaagagaacaaaagaagaagtgcaagtatatgattttagagaattttaaaaggataaatttaatttatcctttttattttaaatttttattgacattatgagtatttaatgttataataaattatcaaataaaaggagatgatgaggtatatgcaacaaatttcattaaaagtattagaagatatgttacgaagagaattaccaaaaaatgaagaaggaggaaatgaggctttaaattattacttagatttatctgactggaaatatggagtactaaaattagataaaataactacaagaaaaggtaggtatgataatagatatacttttgtattaaaaggtataactccacacgggacacaaatagaagtagaggattatgatgtttttggattaataagtaaactatactctgaaaataaagacttattagaaaataatagtaatatcttaaataaactaatttatttgactacagttagagatgaaaaacatattttatttctttatgataattattttacaaaatcagaaaagtcagttaaatcagaaataatgtattttttagtaaatgatagtaaaccaagaattagtcttattctattatataactataaaggaacaaaaagatatatggaactaaataatatttatgatttagcaactgaaatagatgatgaaattgaaaggataggtagataaaatgaatagattaactctaattataattaatttattactttttgcaagtataatatctaatgttttcttgtgggcaaaagtgaattggctaactaaaaaactaaaggatagagggttattataatgaaagaacctataaaatacttactaaaagataatcagagtgtagactatatactagatgagttacaaattactcaaagtgtaatatataaactagaagataaagacaaaatacttagatttattaagatgttaaaagctaattacaaaaagaaaacaaagaaaactacaaacacagctgaacccagagattatgtctatattaataataactctattggttggacagatacttataaactaatagaccaaaagctagacttaatagatgaaactaagtctataaacttgaaatactatataaatatagactttctttctgaaattaagctagataagtctactaagtttgtaggtatactggtaacagacacttatgtagtattcatctctaatacatattgcattatctgtgaaaaggaagatgaatctatggaattacctattgatagtctattacagtctagtaaggcttttacagacactcaaacactaggaataactactaagtcattaactggtttcaaagagcttaaaactatatcacaagcctttaaatcagacataatagatttatatagagtaacaaatgtacctaactcattttatcttactcttaactatgataatttagttgcttatatgtctattcagaatcattcagaagatagacatattaagatagaccattctattataagagtagcttttggtacagacagtctagttaatatagataatattaatcctagtctagtggcacattatgatatgaatattcttgagggaatattaaatagtttgattggcaaaacattaacattaagaattgcaaatgctagtatgacttctcaattagtgtttgatttagatgactttatgatattgttaatgccttgcaaataagaaattacataaacataaatataaagagaggtaacactctcttttcttttattgtaatttatgcttgacaagattgcaaaagtatgatataatatagtgagaactgaaatgttttagcaaaatattatataaggagttattaagtgaaagatacaaaagaaaagaaaattatatgtgtttataaattatattttataaatgacccaaataaagtttatgtaggaagtagtgtagattttaagactagattaaatacacattataaagaattattggaaaataaacattcaaatattgaattacaaaaagattttaaagtttttggagttttaaatttaagatgggaaattataaaagaatttaaaaatataactaatcaaaagttattagagcaagaatccaattatatttctattttaaaagcgtatgaaaatggatataatagaacttatgttactacaagtaaaaattgtttctatactccaaaatattctagtagaaagaatataaatactttactagaagaatttaaaaaagatagaattatacatgtagaaaagataaatactaaggaatatttaagtgacttatcttttaaacaaaataactattcagacagctggtggaataaacaaagtgtagattttgtaacacatagaataagtagactaaatgcttacataattaataattataagtgtgtaagaagaaatataattatactttttagatgtaaacaacaaatagaaaatattttaaatttaccttctactagagataatagtacaaaagtttctaaaaatataataaatagaatgtttagagatgaattaaaagataaaattaaacatataggaatattatcctcttttcaacctttaaatttagagaataatactaaccaagaaaaagaaatatatcaactttatgaatttttgattagattaaaatacttaaatatagatacagaaatttatatacatactcctgtgtgtttatacaatttatatgtaaaatatttaaagactgattgatttcagtcttttctttttataaaaatatttcttgacatcttttaatctatatgctataataaattatcaaataataaagggggtatgaaaatgtacttagattataaatttacaagaagtattgcaggtaaagaaaaacatttatatgttttatttaataaagatactaaggatatgtactttgatttctttgatgcaagaaagttattagaaatagataaagagtattatgctaactttgaattaaatgcaaaagtaatagaacataaaaatccatatcttaaagataaaaagaaacataaatatgtacactggattgtgtttaataagttgttaggaggaagatataagatagggagatgggaattatttgactggactatggatattatttatttcttagaccctaatatagatgttatgcaaagtataaaagctattccatttatttatgctagtagagtactaaattttgagtatattaatagaactacacttaaagagtatttaactagaaaaggtgtaatggaatatgatgatgctagacctatctttgttcaaaaacaatggtttacaagtacttatagaccctatataacacaatttggaatatataagataaatgaaatgttaataagggataaatatgagaacctacctcataagaagaatgtaaaacatgaagtaaaggagagtgagtatggaaactaaagattacctagttggtatgaatttattaaatgttgctattcaatctcaattacaaatagcaagagtaagagatatattatgtccttgttataatgaattgacagaagaacaacaaaatgaatttgacaaagaaataatagcaatacaagaaaaatatgataaattatatgaacaaaagagagaagaagagtatcagaagtggagtgaacattatgatagattattaaaagaaaaatataaaggagttgatactaatgactaatgaacaacatgcactatatgaaaagttatgtagagaaaattggtatgacaatttaacagatgcacaaaaatttaattttagcgaaacattttgggcttattcctgttctaagaatataggattagaagaattggaaactgaaataagaaaatggttgaaggaggctgattatgcttaatgaacaccctttaaaaataagaattaatactttagaggatatgtttaaacaaataaacatattaggtaatgcagaaatgagtaaacataatcatctaatagatttaaaatatgataatcctgtttggtggtatgaaggtgataccgaccataatataagagtaaataaaagattgggggtattctatagtgaacctaataaattactagaaatttatgtatatgtatctatgcttggggaagtaataatacaaagtttacatagaaaagatgttagatatgactataaatgtgagtatagtcatctaggtaaattctttaccaaaaaacaaacgaatgaattaaaaaactatatgatagaacactatgataaaaatgaactagaagattatgcaatgacagaactaagggaatataaaggagaattaatatgagtgaaaaaatattgaaacaagtaggttggatattgaaaaaagaaaaggataaatatttaaaggaaatttataataaaactaattgttttacaaaatggtgggattatgaaaattgtgaattttctactaaaagaaaattgttagtagatgggagattacatacaataatttgtagaatagataatataataatttatttttgtataagaaaaaaaggtaaaatattaatgtggggtagtcaaaatgatgtagttcaacctgtgatagcagtagaaaagaaattaacacaagaacaatttgatgtacttaaaaaagctattattgaaaaggaattagaacacaaattgtatatacaagatatattattcttgtaaggaggtagagatgaaacacgaattaatattagttaaaagaaaattaaatagtatagtagaggatatactttctgtttatggtttgaaacaaaaaggtaaatggatatacgcacctacaaatattaatacttattatgatttaatagtaaatagtagattaggaagattcacctatagattacataatagtgagggtaaaattcatatttaccttacaaaagaaaataatataattgtagaggataaagtacaaatatcctctttgcaattaccaaataaagtagatacattaacaaaagatgagtttatatactttaaagaatttatattgcaaaatataagtactactaatatagatgactttttaaataaggaaacagagatagaattacaagctatttatggtagtaaatgtagtcaatacactataaataatattcaaatactggaacaagcattattaaataatcaaataactatttatgatatgaaagatttttatgagaagtgttatcaagtcagaaattttgagaataaggaagtaaattggacttttagactaaaattagatgatggtaaaggaaatttactcataactacttatataaaggtattcttcataggcaaaacaccagaaagaatagttgtagtgtgtaaggatattgtaacagaacaagagtatactttaaatatagaagtagataactttgcagaaagtataagtacacaatggaggaatatttatgagctttaatggaattttacaattaatacaagagtatgtacctaataagaatattagatatatcataatatgtgcaattctatgctttgttatatggttattaaagaggggtaaataggaggatatatggaaaaagatactgtattagaggtagaatttaaagaagtttgggataataaatgggcttggagagttgttaaaaatgaagtagattttaaaaatacagatggagaaataatacttcattatataaaactagattgtgcaaataaatatgatttatatatttttggtagttatttcttaaagtgggaattgttaaacagtgataatttaatagattttgatttaaaaacagatatacaagattttgttaattatgttaataaaaaatatggaatacctaaaagatggagagcaaataaaaatgatagttattttattgtgactaattttggagatatagtaaaattaacagaaaaatataaacaacaggatactctcttttatactctaggaaattattttaaaactgaagaattagctactaaatttagagatactatatggaaagatgcttttaataaagcaaaagaatttaatacatattaaatttgatttacaacaaagaataaaaagatatatataaaatagactaccttgttaatcaaggtagattttattatttaaggaagtgattaagtgcaaaaacctaatttattagaggataaacctactataaatgctgatgagaatgtgtgggggattaagttaaataaaataatagataaacttcaaacatttgtaaacagtgtagtagatactataagtgggaagttagataaaggtaatgtatcttctaattacaatacagcagaaaaaatagagaatgaaataaaaaataaagttaatcaagaagattttgatagaaatatatcagaaatagatgacaaacaaagagaagtagataactttattcagatttttcaggacaaaaactatgtatatcataagagtaaagagttatatgataatcaaggtaaaattacagaactaagtgtagataagttgactgtaaattctatcaatggtaatagtgctagtggcggattatcagaagaacaagtaaaagctatatgtagtaaatattatgagcctaagtttgataaaaaaagtggttggaatttagatataagttcagatactaactctaatgctgataatgttattgcaagtactaaattagtatataatattgctcaaaataatattaataaagattatttaagtaaaattccacaacaattaagtattgatggacatattcttaaatataaagtagagcaaggtggtagatttatagacaaagagttaaatttacctaaaagtgttacagaagaatgggcgaacaataagtttgaacctaaaatagaagaaaagaagacaggatttaacaaagaaaaatcggatgattatgagatgggggacagtaatgttttagctagtactaaagccacagagaatttatcaaaggacttagataaagttatcaaagatataagtatagatgggaataagttaaagtataaagagggtcttataggactaaataaagaattagagttacctagtggtggaggaggtagtgtagcacttccacctaatactgttttaaatgaaaataatggggatttaaaaactaagagtggagttcctattaagaatataaacttaactcacttgaacggtaaatctttagaagaaagtaaaaaaaatagaaaattttattttgattatttagaaagaaaacaaggagtaccaccaaaacaaacagattttaaatatgcttattttctagatacttatacaaataaaatcttatttatagatgatttattatcaagtgaggattttgatgataaaagtttagagggtttaatttgtaattataattataataataatatgaaaagatatatatatttagattatagtgcttcagggtacacaactataagcaagaatacagaagaatataacatattagaaagttgggaactagaagctaataaactgtatcttagtacttggtattatagtataaactcggtcaaatatcctgcttattatttttatgacttaactaaaagtattatacggtctgaaggaacactaggtataactctataccctaatatacaagataatcctcatgtttatccagaaaatgttcctgtattgtttatgaaattaaaagatgcttactatgttttagacttatgcaatcctattaattttaatgaaaaaataatagatagtaagaaagaaacttataaatttttttggtatgttaaagaatttattaaaactaatctaggtagtagtgaagtaagacaattagtagattataaagctataaaatcctctgtatttaatactgttaaaaaagatttgaatcttattcctactttagagtttgaagatacttcaggtaaacttaatatttttggtagttcttcttgggatgaagtttcttattataaaaataaacatattaattatttttataagatagatttaaaagatacttcaaatactatttatggatttgtttctctaaataatattaaaagttatatatctacggaaaatgattcttcttatccttttgctgttttttttggagataatattttttataatagaagaattaaagagatatggagtagaggtttttatttagattcaaaatattatttacctaattatagtctttatgctttctattcaggtaataagtatacttataaagaaatagttaataatactatagttactgcaaatatatctaatttagatagtaaaaacgtattggaagaaaaatatgtatctaatgatgattcaaattcaagagtttggatgtctatacttaattgttctaattcgagtttaataaatttatcttcaaatacacaaataaaaattaataacttaaatataagttttatattttttttaatgagagttaaattacaaaataattataaaattttagaattggctaatagtatgttaccctttgatgttacacttacacataaaaatattgattatagattttttattatacctgaaataccttatgttaatatatataatattgaaagtataactccaagatacataataggcttgaaagttaataatactatatatagatttataacagaatttaccccaaaatctctatataatatacctgagtttaaacatattaagaatatgtttgatgaaattattagtttagattatgaatctaatgccaattttgaagattattggtatagttatcaagatactttattttcttggaaaaataatttatataataaatatagttttaaaattttaaattatattagagataaaaataatgtttctaattatgttgaatggtcaggaggttctcttagaaattatttacaaggaaaattagaaacagtaaaaataacaaatgtaaaattaagtgtaaatgaaactttattagatacaaattatcttaaacaatatgaagaaaaagacgaatattggttaaatattataaatagagtattaaatacgaatagaaatattataatagatgctgaaggaaattaaggagtaaagtatgggtaattggtatgacataatgacatttaaaagagggagaacacattatatagctaatagcagtaactataatatagatatacaaaatactttaggtaatggagttccttttaacaacccaaaagctatagtaggtagtaatggatttgtttttaatacggaaagtaaactgtataataaacattctataagtggacaaactttaaatatacaaagatttagaactccgatgatagttcataatgaaaccttagcagtacaatggatatattccgtaggacatactacaattactatacctagagaatggagcatatctgttgaaaaagtaaaaatgttaattttagacttaaatgttgtaactggaagatatgcacctagtacaggtataggtttacctgatttttttgaacctgatgtaaatatatttcaaaataatggtataataaagacctatacatcaagaggacaatgggattggtattcttctaatcctacatataatgtatataaatctggggatattgcttacgaagaaactcgaagtgctaggtatataatagaaacaagtggagatttatatgggaatacatataaaatatctataggacctttagaattaaatagtttaataggacaaggaagagatactttgttaaaattatattcttgtacttattttatgaatttattcgtttatattacactttactatgaggattatgacaaagacttaggttcaacttctactgcctatgtttttgaaggttaaagggggtcaaactaatgcctaattattatggatattggtatacaataaaagcatttaagcaaatagatataatagaagtatctgtaaatactaatttcaagttatctgaggtaagtagatataagcaatgggtaaatcctacatttatacctacatttagctattataaaggtgtatactctagtcaattagctagtttaaatgtaaaatatatagatacagaaaaacatatatatagagtagaaagtatggatgcagataacgggagtagagcttatgtattgattgtagaagaggatttatctctaagtacatatgaccgtccacctgttaataaaaccactacttatagtggaagttgggaaactcaatatgtattaaatgctatggaagtatattatgtaaacagtagtaatgattttactttaattcttccgaaagatacaaataatgttaaattttttcctgtgtttgactatatgactgcacctttaggtttaagagagtatacctttagtatacaaaaagtaaataacaggtcttggaaaatattaccttattttagatatagttataaaactgatttttatagatttataaattcttgtaattttacggtatatagtgcaagtctaataagattaactacaaatacattttatagaaaatatttaagaaataatgataattcaccttttggtggctcaacagtaagctataatatagcaggacaaggtggaagttataatgtatatgctaatcctagcgattgggaaaacagctatatgtatcaacatccatctttaggtactttatggcatcctttagaatatcaaactattccatatacaaattctgtattagtaagaactaatgagatgaaaaatacagcttttaatgtaaatgtttctactgcattgggtaagaatgctacacagaatgaaattgtagtaagtgttactagactaggggatagtttagtaccttatactaattgtggattaaaagtatttgtaatatacgaatagaataactcccccaataacccaacacaaaaaggaggtaaacccaatatgagattactaatcatactaatcttagttatcatattactattatcatattttagaacaccaataaagaataagatggtagaaatatataacaagataaaagcaaagataaagaaataaagagaagagagatgtaaatacatctctttttttcatataaagtaaaaatactaatatttactgaattttatttaaccttatgagagcttgtttaacgagtttaaaacgagtgaggtatataattatatagctaacattttagaggcaccttaaaacgtctctaatcgcttcatttttatattggtatataaagagaaagtaggtatcaaaaagataccaatggtagaatgttgagtagactaggttgagagaaaatattaatagacaagtattgacataataaaataagtatgatataataagatatcaaatataaaggagaggataaaatgaaaaatttatatgaggaattagataatattttagaagaaaatcatcgtatgttagatgatatttgttttgtaactttggatgaaataggaatgaatagaagaaccttttatgggaaggctaaagagtgtaattataaacatacaactgaaataaattctagtttaaaaatagttggaagggattttgttcttgtatgggataagaatactggatttagatttgtatttttagattatcctgaagaaagaaataatcatagggatttaaaaataaattaaaaggagagtgaaattatggatagacctataaataaaatatttgcaaaagtaaaagttgaaatgtataataaattagatgagttaagacaaaagtatcaaccaacagtagatgaacatataactttaaatgtactagattttgatgatttacatagtgtaaatagaaatgattatgcagattatgacttaggatacatttatattagtaattattttaaagttaaattaattattcaatctataagtttgaaaataagtattaatgttgaaataaatcctaaatatatgaaaggtttaaataaatattgtgattatgacttagtgaaaattagtaaagaagaatataataaaatatatgctgaaatacaattaaaagaagctaaacaagtaaataaagaggaattaagaaaagaaatgggaatatttgggttatttagtagattatttaataaataaaggagagtgataatgtgagagatataaaaataataaatattgtagatgatttcagttttgaggaaataataaacccaataagagtagaaaatagtaattatatgttattattagatattcaaggagagagaaatactaaaactatactattgaatgaacttaagtataaaataactatgaatgatggagatgtagtattattagatggtaagaagaaaatgtcaataataaatactgtgaacttaatatataatgtaatattagagttcaagttaggtagatataatggaggaaactctcctcaaaataagaatttactaatagtaatagatgaacctaatgcaagtgtaaatattagtataagagaatggttgtaaaatacaaataagattatatgaaagagagaataaatatgtaataaaatagaaagaaaagtatttagattgaagaaatgaatgttacttttaatattatttttaattttaattttggcagtaacagatgagtaaaataaatataattagtaggaggtatttatgaaaaagataacattacaaacacaaaaggtatttaatggaaaatatgcttttacactagaagtaaattttgatagtgtagaacaagaggaagatataatatattatgttaaaacagataaatatgctgtatataattttaataatagttggtatatcttagataaaacaactcatattaaatatttagaaagtcaattattgaataaaatacaattaaaagaattaacaaatttgattaaacaaattaataaggaattaaattataatagagtaaaaggacaagaatattactatatagattctgacctaacaataaaaaagagtacagaaatgttttatagtatagataataattcttacaaattaggtaattattttatagataagaaaaaagcagaagaaatagcacttaaattaaaagagttttggactaatataaaagatgaaaatgatacctatatttttagattgagttctaatatcaaacaaataaataatataccatataatattcgaggtaaattgttagataagatattgaagatatgtaagatagtagataaaagattaatagaatttactataataaaggatgtataaatcaagagaaaggtgtagaaattaagtttagtcaaaaaatagaactaaaaggtattaaagatatagaatatatagatataggagaaaattatgtttatgcttgggtatctactctaagtaaatatcagttattaaatatatagaatggagtaattatgattaaaaagataagattagtagtaagtgatagagttcataatgaggatatgtctattcttgcagaaagacaccagcaaacaataaatgcttatttatcagtatacccaaatagctatgtaattagtaataatattaccgaaaattgtattataactatgatagaatatgagattaaatcttatgatttatttttgtataataaaaaaaaaatagtaaagacatccgaatatgactcgttacgatacacttatttagaatatatacacagcgatagtctaactgcatatattaaagagatgaaagagatagtagatataactacaagacttgtagttggaaggtcaaactagaagtttatacactacaatatattataaataaaataaaaaaaaaggaatatgaaaaaataacttgacatatttcttttttaatgctataatagattataaagttagagaactacaactctcttaggtactttataagaacattggaaagagtgaatagccgatttatcttgtagacaattaggagctaccatacaatcagagtagaatatgagtaataggaaactattgagagttatacagaatgagagtatgaaagagatagcatatatttgagtgataacgaaaataaaagagagaaaaagggaagtaagatgagtgggatatgaggataaggagagggaagatatatgaaagaggagaaataggggaggatattttatatgtgtgtataataggggaag

SEQ ID NO: 4 - DNA, 79365 bp, Artificial sequence
  bacteriophage genomic nucleic acid sequence
cagaaataattgaacaactatttaactgttagcactctattaaagcggttgctaataaaagtattattcaatcaaataaaataattttattgactaatattgatgcatcataatagttgtatagtaaaataataattaaataaaataatatgatgtactattaattttaaaatagaataatataaaattaaaataataagtaaatcttattaaatattagcaaccgctttaatagagtgctaacagttaaatagttgttcaattatttctggtgagtattttcacccatcggtctctgtgatggcggcggtatatatacattaatttcacttaaaagttataattataaataaccttctcttattttatccactttaccagctattaaaaaaataataaaaaaaataaaaaaaatgcttgacattttttatacatcatggtatccttatagtgtcaagagaaggacgccgatccttcccacaaaagaaattaaaaaaatatattgacataaaatagcttattagttggagtttataccgctataaaagcactctttaaaagtcaaaaaactaattaaaaaggtttaaataccttgacttgaaaagaaattaaaaaaattgcttgacaaaaaaaataaagtatgatactataatatcatacaaggtgattaactccacctactccataaagagctaaaaatagccattaatgcggctatatccaaagcattaaaaaataataggttatcaatgcaacctacaccgaaagtattgaaaaggttataatagcaacgcaagtcctttaaagtgacttgtaaaatattcacactttaatagctgattttaccagtgaatggagtaaaaaagccgttgatcatatcggcgataaataaatgatactatatactttatgtatatttaaaaggacattgaaaattgaatatattaatatttcattagttatagttattttatacttctataactttaaaaactcaaaaagtaataatgaacttttgatataattctaaaatagatgtgggctataaagttatatagccaatgaaacggatgcacaagcggtgccgtttatagtggtagaataccaccaactttaaaaagtgagtaataaacgcctatggagtttataaaaacaagtatattgttgcattggtgtacggttgtgagacgatacaactaggtaaatgtatatagcacatcgttaaacaaacaacaaacaataaaaaataaataactattttaaataataggtatttatttaagtgttcaataaagatttaacctttattattttaatctttattgaatgctttaataaatacctattttagttttatctttaattagataatgctaaaatggtaaaaaaaataataaaggagaacagattatgatattatcagtagcagaaatgaaaaatttaattttaaaaaatggtggattttctataagtccatcaggtaaaaaagcatcaggttttatggtgtctaaaatggattatatagcaaaacctatatctgaatttactcaatcagatatagataatgcaccacttggaaaagatgattttctaggtggatggattgatacagatacaaatatagtttatttggatatatctgaaagctatcaagataaaatgatggcacttgatgtagcatcagatagaaaacaattagctatatatgatgttcaaaatgatatatcaatatatttataataaataaaggagatcaaaaaatgaaaaaaatatttgaatacaatggaaatgtaatggaaatggttaaaactaaaaaaaatatatctatattaaaacatgactatgataatggatttgtgtcaatagatttgacacaagatgaattatattttaacattgttttaaattgtgttccagatagttatgctgggatcatttataatgattattgttcagcaaaatcagttgtagatgattataatgatgactttatatgtcctgtaatggataattataaaagaaaagtgcatccattaaatgcaggagattattttggagtaaatgctgctccaaaataccaagacaagagagaaataaagtttatattaaatttaataagatttggatgttataataatatgtcaatatttattgagggatatgatgagtatcctgaaatagaacaattcttgtttgaacctattggcttgattgattgttctgaattaaatgatatttcttctgatttaccatttgaattattagataaatggtatagcttcgcttgtggaaatacaaaaagagcttatgaaatatatcaaagagaaaatagagaagagatctatttacctatatctgaaattaaaaaacttagagaaatagttgatgattttggatatatagcatatggatattcggcagcttgtattgattggagcagccattgtccatttgctcaatcttatacattaaacggagtgtattcatacaatgtattttgggatgaaatgttagaaggggatatatcagaaaatatagatctaatatatctatatttaaatgaaggacaatactcttataattatatcagtcaatggagttataatcaatatccagattggacttatgataatgattatagatgtatggatgatggagatttctaccatacagattgcttatggtatgatggagatagagatgagtggagatttgaaagtgatcaagatgaagatgatacctatgataatgatgacgatgattatgttcatgagtatcatcatagaggtaacttaaatgcaccagaaaagtttgaagaaggtgcaaagtttcaaataggacttgaagttgaagttgaattttcagatactgaaaatgtatttgaattgactgaaacaatagttaaaaattactcagataatgaaagcaattttcacttggaaaatgatgcatctttaagagatgcatcatttgaaatggtaacagctccaatagtctataatggagaattaccaaaatggtttgaaaaaaccatcaacaaaataaatgaatacagtcctaaattttggaattgtggtggacatattcatatagatagaatgtcttttaattcaagttttagtaaaaaattatttatatatctattcaattattttagagaaatggttaaacaaatttctggtagagatgggtattgtagttatgctagatttcaatatccaattagtatagaaaaaattaatttatataataatcatatggaacaagaagaaggaacagaaaattatgattatagatattgtgtagtcaatagagaaaatgatcacacaatagaagtaagaatatttaaagggacaactgatttgagagttatacaaaagagaattgatgtccttaaaaatatggttgaattttgcaataagtatatcttaaataattatataatagacgataatctaaatgaaataaataaaataagttggcttgaattttctggactaactatggaagatacaatgaatttttaataaataaagtgaatattaaaataaataatatccactttttaaataaataggagagtgatttaatggatattaaattaaatatcaatacatttgtagatacattttttacagtttggcattactacaaaaaagataatgataaaaataaaaatcttatcattaaaggagttaatggaattattgctatcaaaggagaaaaagcatttaataataatgatattaactttgcttatgttagaaataaattagataaagtaataaaaggaatggatctaaattcaaatatagattatataccaacaatagaattagaataaataaaaggagaatgattgaaatgaataaaattaaatatgaatttaaagataaattaataactataaatgataatataattaaagttgaaatgttatctgggtatcaatcatcatttgaattgataattaataatagagagttgataccatcaattcaaaaatggataattgaaaatagaagtgtatatgaatttataaaaattaaatatcttaatgaaagagattgttggtactttaatagtggaaataaaacctatgtttgttttggtgaagatttaagtttattgaatttagatatataaaggagaagatgagatgactaaaaaagaaaaagaaatatatttgaaattagaaaatgtattaggaacattcaaagaattttttggaacaaaagtagaagtattagatattattaaaactaaaaaaggatttaaaaaagttatattaagatatacattaagtaataatataacttatgtatcagaacatttaattaaatataatacaagacacctagatggatattttgaagtgtctgcttggggagttgtcccattgaatgataacaataaaaaatataataaaatgaaaattacttggagtgttagttggaattacataaaaggattattagatagataaaaggagttgatttattatgatacaaaaacaaaattgtttatatggagaacacaaaaatttatgggagaatattattatacacgctttttataatgtatataataaattagatgacaaaaaagatatgatcaaaaagcaattattaatgcagataaaaaatataattgtgaatgatttaggtaaagttaaaatgttaaaagtaaaattagaaaaagagaatgagccttctcttgtattctattttagtgagaagttgtttgacaaagatatattagaaaattgttatacaatgttacaggacatattgtatgataatgaatataaaataagtttagaatttgaatataaataatgctacaatttatttattcattaattatgttaggtgtcctgtacctagcatatattaatggagatacaaatgattggagatggataccaataactatattatgtttagggatagtaattaagatagttaagataaattcccttgacaaaagaaaaaaatattggtatactaagtggagtaaaaagaaataaaggagtaaatgattatgtataataaaaataaaattgaagaaattatatatgaatatgatgatattattaaagatgttgcaggagaaacaaattatgatagatgtgtatagagaagataatttttctaatgaatactggataaaagatgatataatattagcaaagaattatacagaagtatttaatacaataaaagatatattaatataaaggagagttgatattatgaaaaaattatttttaggttttattttattgagttgcttgtcaattcaagtaaaagcagaacagtatgttaaatctatttatgtaaaatttaatgttactggaagcggagttggagatgatattgaaagtgaaataaaacatcaatatcaaaagaatggagcaaaggcaattagtattgctgttaatggaaactgggcatatatattatttgaaagataaaaaaggagatgatttgaatgccaacaagtatattaggataccacaataaaagttttagtaaatataaaaatccatctgatttaaaagaagaatttatagataaaaaaataaagataggaatagaattggaatgggaatttgataacccagacaatgatggatactatgatgatgacgacgaatgggttgaagcagatacatctaattattatagagaaagatttattggtaaattaaatagagctggattatatccagaagaaagttatagaaatttggataatagaacattagactttacactggaagaagatgggagtttgtgggaagatagctgtgaatttgtcactcgtccaatgaatttccatccaaatgatttaagtgatatggaatttatgaagcaagtcttggatatattaaatgataattatgatgtgtatagagaaaactctggtatgcatgtacacatcaaccaagatgatttctaccctaataatataatgaaatctaagttatgtcaaattctattttgttcattaatgaataaaaatgaattttgggatgatttatataaatggagtgaaagagaagatgaaggacatactagaaattatgcagcaccaagagaattgattgaaaaatataatatagaaacaaaaatatctttacttgcaaaatacagaaatcaatatgatattgcaaacatagtatctaattattggtggaagtgcttgaatagatgtgaaaacaaatattcagcaactcacaaaacagattatgatactattgaaataagaatatttaattctactacaagttgggaaacaattataaatagattaaatactatctataagatgattgagttttgtagaactctaacagatgaaatattagacaagggtattgaaattaaattaaatgatattcaatgggaagatttctataataatagatgggataaaagagaaatgaaagttggtactgtaatatattctgttacagatgctcaaccattcttagtaatggattatgaagatgttactaaaacatttagagtgattagactaagagataaaatagattatattatagatactaattttagggttaatggactagaagattttgggaaaatgtttagctttgataagattaaagggggacttaaaatgaaaacaataacagaaatagtaaatgaattaggattgaagtatcaaaaagattttaatggaatggaagatggaaagaaaattctattcctattgaatgataaaacaaatggaatatataatagaatatacacaagttgtaatacaggacttggtggatttgttagagtggatggagaaaatcatttcactgaaatacaagaacaatttatatctaagttgaaagaaaacaatacaacttgggatgaggttcaactatatttaatttatcaatatcaagctgctataattggagaagatagtaatgattaattatatctatgctattggctggatatatgttttaataatattatttgaattatatatatgtaaggataggactttggataatcaaattcaaaggcttatcctatatataatattggaaggagtgatgttaagatgcttttttatgatataaaaatacctaataatcaagtgatatataagtgtagtataccagaaaatgtactacaaaaatatggattgtataacaaaaaagaagatattaatagagtattatctaaacaagaagcaccagatatgtttgatgagttaatcattgatgatattatgagtgcttattatgtcaaagatgagaatgatttaaaagatacacaagtatttattctaggtgtagacttaggaacaaattattcttgcggtactcttttatatcaaggatgtcttgaagataaaactatatttgttagatgtggaaataaattttataatgctaaacatcatatgttattattcaatcatgactatgataatttaatttatcacgggactagacatacaacagtagaagaagttgataaaactattgaagaaaattggggtaatcatattacattctttaattttagattttgcaactttaccaatgtttgtatactagataaatatatggttgaatgcgatggtatattaattaataaagatattgtttcaacctttttaccttgtggaagggaaagttggcaatgcctagacttagcaagagatgaagaaattaatacaactggaagcagcaacattagaataatgaatataaaagaatttgataaattaaaagtatcttttagggaaagaggtgaaattaataatacgccaatacactatctaagacaaagatatgttgaacacagtatctttgaacacaaaagtcaaaaaagatttacagaagatggagtattgagaattaccaaaacggaaaacaatccattgctttatcataactttataccaaacaagtataaaataaatgatttaactactaaaaaaaatatagaaaggaaaacctatacacttggtattgagttagaggtggaagcaaaaggtagtgaaaaagatagaaatggaattgtgaacgctgtgaacttattaaataaaaataacttagaaaacaaagatagatattttgtggtacacgatggaagcctaaacaatggattagaaattgttacacatccatttgaaataaatataaatggtgtacctaatataataaaagatttgcaagagttattacatttcttgtcttattatacatcaacatcagatagatgtggattacatattcatataggtagacaatcatttaaagaagatctaccacaaaaattaaattatatatttgaattgtggaacgatgatataatgaaagtaagtaggagaggtagagaaaatagatattgtaagatgcctcatctatttagaacagataagaagttaatgaaattatggaacgctaagcaaagtaagttgtatgatgtagcatatacagatgataagtatgttgctgtcaatacaaatcatagtaagactattgaaataagattatggggtggaacacaaaacccagaactaatatcaatgtacttggaactaactctgttgctttgtgttgtggctaatacaagaacatatggagaattaaaggaaatggaattgaaggatttaatttcactaagtaataataagatgtttaaaaaacatatgtgccaattacttggtgtaaatataaaagacttgacaaataaaaagaaaaatgctagaataagtaaataataaataaaggagaagtgataatatgtgcgttataatagttaaagaaagaggacaaaaattaattagtaaggaaaatttaaagaaatgttttaatcataacccagatggtgcagggattgcgtggactattggtacaccagaaaaccctcaaccaatatctattgaaaaaggatttatgaagtttgatgatttatggaattacttaactaagctaggcttcaagtataaagatccagacttagtaaatgttagtatgatgcttcattgtagaattactacacacggattgactaataagagcaatacacacccattcccattaagtgaaaatgaagaagatttatgtgcagtaagtttaagaaaacaaccaaaagctattgctcataatggaatagtatcatctgttactgtacttaaaacaggaaagttaagtgatactatggagtttattaaaactcaactatatccaattagtgaaatgaataaagattggaataaatttccaaaggtattgaaagctattgaagaaataataggaagcaaattagctattctaaacacagatggtacaatagatagagttggtgctttcactcaacacgaagatatgttatggtattcaaatatgcactgggaatggaaagcaaatacattggtttggagaggtactggtgctgggaacacttattacaaaaatggaagatggaattactatgatagcttatattgtgatagtggttatcttgatgatgttgatgatgaatttccttttaatgtaaatggaagttgttgtactccatcaactaatagtaagctatatgaagatgttgatacattgactgatatagaacttgaagaagataaacaaattaaaatagataagttagtatctttaatagataaagggataactcaatgtaaaggaagtgaagtgccaaaactattcacagacttagatggaaatttcttaactgatgttattttagttgagatagataatgataataaatcttattatgcgtatgaagaagaaagatttatatatccaatagttgcaggtgggtttgataaagaggttggattgattaattgggtaaatgaaaataaagataagacatttgtgtttgatattgatataaaagaatattaataaaataaaaaaggagttgatgtattatgttattaggtggaaaagatatgggtgctgtatttgcacccttttataataatgagttttctccattggtagaaggaaaatatggagaaatatcattaggtgttgcaatgaatgatataagtaattatagtgaagaatggattgaaaagaatatacctaaacatcaaaaaatatatcctaatattagaatggtttgtgtattacaaaatcaaaatatattccccctaaactgcaataatagaaaaggttttgatgtggattgtagtgatggagaatggaatatggatgagatggttagtacaagattatataattggagtaataaaattggagataattttagacaacaatatagatattatattggaagtatatttgatagagatttccaaagcctagtagtaagatatagaaaagatggagtaaagagtgatacttcgtatgtagaagaatgcgaacataatactctatttaaaaattgtgttagtagaagtaggagagtagatggaaatggaaattatagagtagataaaggagaagatttaaagtgggggaataatgatgagtggagaggattaagtagatggagctggggattatttaaagatggatataagaatagagaattaaaaaaacatttagcaaacttaaatttagggtatacaaacttagaatggaatgctatttgtggtatgcttgatgctacattcttctgttattatagagaaggattaggtggatcaatgtcttataaacataatattaaaaagatattgttaaaatggattaaggattatgaaactaaggaaatgctaactcctagatttttcaatatgtttcataataatgatagtgtaatgaaattgaaaaaagattttctattattcttttataaagtatttgatttccaagcaaatggtacttggttaactcgtaaaaatatatttgaattgaaagatgaagataattggatagaattatttagtatgttcccagcattgaatgaattaagaaaggaattatttgtagaagatagagaacttggagaggaagtttgtcttggagatgaatacttttatggatttattagaagtttgtggggatggattaagatggatgaaaattggaagtgggttggatttagaaatagagaagctcaaatagcaagatataatagtgaaagggatgaatttgattactttgaaaattggagagattttgtaagtgatattaaagtaaataggcttaacacagatgagtaatgatataggatattagtggaatttttgtaggagaaaataaaagggggttttatacccccgtttttttatttaattgcaatggatttttagggatggacttagcggagatgagtataccctactcacgcacaaattaaaatatcataagcattacctacttgcctatttaccatatgttaaaggctctctctactcccctatttatctacacttcctaacttttaccccttaacactaggtaaaatcaatagttgaatatactttattcaaagcccctatttatggactatcttgttttgatgttgatgaaggtgggacattatgtggggaaagatctttattatcaatacaattcttatactgataacaaggagattgtaaataaattatatattcgccatccttaactatcatcacatctttatattcttgcattcctataaatgtctttccatgtatatatgcaaacttttctaagctatatactatatccattcttaaatcaaaatatattattgtaaactttgcctctcttttatgaaaaataaaagtgagtacaggtaacaataatattaatattactatgtacaacactatcattcacctctatactcacttaaaatttatttagtttcttttctcgcaccactaacactaccatcgtttctcattggtaatcttttagctttctttatatcactacgattgtatactttaattcccataccttcttcattttcattaccacttattgttataacagtaccgttattcaatgctgctattactacattaacatggaatatatctccattcttattatctaaaaatactaaatctccactttccaatggttcattaggcttaacttctattccattatttctatataattgttctgcactaacagatttacttgtaatataatcacttcctaaatatcctatgatagatgcatcccaacctaaatcttgaacaccatcaacatctggcatattaccaccttgaacttgatattgatgaactctattgtccccattctttggatcataatctctatattcatatatcattcttcttgctagtggatgtattcccttcacttccaatgtgctatctatatcttcatcattaggttgaactcccatcatttgtaatgtagtgtctaatgataaagtttctgtattagatgtacctacattttctcctgcataagtttgtaattctatactatcaacaggatatgatttagcaattaaattagactgtcctaaaatatcatacacttcacttccaactctttgtttcattacattcatttgttgaagaatagatttataataatttccttcttctgcaaacgcctttaatgctgctaagtttacactaccatctgcatttcttctaggtataccattaatctttcctctactccaccatttacaaaagtcttcaactccttgttctaaactatcataatctctccaatggtatgtatttccattagctttatttttagttgtagtataacttccagtccagttacttccagtagtcatattaaagtaattatttttaccttttacttttgtaccatacgcactttccatagagaattgagcaagtattaattcaataggaacattatatttttgtgcataaggtgctgcaacctttaataatgttctcatattttgatccttaactttatcattaggatgtagcttaggtattttatttattgccgcctctaaatctgcctgtgtatattcacttgcagctgtatatggagatagttttggaatttcttgtgtaccaatattatcttgttttacttctttctttggttcttttataccagtatactccatagctttttctcttggtgatgtttgtttaaacttatcattataagtattgcctaaaataattccagctgcatttattggattagctgatatactagctattgtagaaataaatttatttctttcatattcatcttttggtataatattataaaaagttctaggcttgttatctcctaattcatctttatattttaacatatctgttatttgatttctacccatagccaattcatctggtgttataccagtgtatgccataagtttaatttgttcatcagacatattaattccatactgagatttcattaactctttaacttcatttaatccatcaacatctatttctgaattaaccatttcatctgttacaccaacagctaattgaatatcttttaatgttaagttttcttgttgagtagatagcatttcagacattactacaaccttagctttattaacatatttgtttccacccataacattaataatatttttgttaatccaattttgttcttccaaagtaaacatatcattcattcttttttgaatttcatccttagaaaatatttcttcaaatgatttttctaattgttgttctgggataattcccattaaataattatccatataagcatctatcatattcatttggtcttcgtagtacattccaatcatttgtccttgtactgcattaaccattccccctttcatttttttatcagcttcaatataatattcttttaatttatcttctgttaattcagataaatcaccattgtgatctttcttgtatttgtttaatgcaaaagttgcaactgttcttttataatcaaattcagcttcttctgtatcttgtgaagataaaattgtgttatctaatttatcgtcaaatgatgtattaaaaatatcttctgcttcattttttattaattgcatattatcaacaaattccataaaccattttctatcaacaacatcatcatatttatattgagtttgttctttaagattgtcttcatctccttgttctacatttccagttactataacatcgtcattatcatcaaaactattttgtctagctttaatatatgctggtaaatttctagcttcttttattattcttacaataggattatccattgataaaatttcatttgctaaatctttaacttcaatagatgacttagttccttctccactcattctatctatatcatatcctaaatcagtttcattaattccatttccaaatcttaaatcactagcatcaaattgtccaacttttttcatttgattagttaatatctctgctttttcagcattattatatgccttatcaaatatcattgttttcaattttgttgcagctaattcatttgtaaatccatatgttccccataataacattttagctaattctaatccaccagaatttctaacagcttcataagtatttctatctatttttaaagttttttgtacccaagtttgttctccatcattatctaaatttaataagtcatatggtttattatgtcctacaataaatggatatattatttgagataatggtataattttatttgctactatacttacagaacttgacattgcagaaaaatctaatccaccagttgttccagctattccattaacaaacatatttttccagttattaaatggattataattatagttagcattaaattctgccatagcttttgcttgtctttcatcgtcccatttagctctcatcatattataaacaggcgacatataattataggctaatccaccaacagttgcaactgctactgtataaaatgttttctttccactttcagctgcccactttttaaatccatttgcttttctaaatgtatcacttgtatataccataccatcttcatctatataagttgacatattatctaaataatctgacaatacatttaatggtgttacataaaatccaaatttagtattagctgcaagtttatccattttagtttggtttcctaaaactctattaaataaagctctattattatcatgacttcttttatagatagatgtattcatagcattttcaaattttcttattgcttgaatttctgtattatctaatcctagttgtaataattctatattacttttactcattaattcccatacagcaccagcttttggcgttccattttctgttacattaactctttcaagtatcccattaatattatctaatgttttattatcaattccaaaagcatttaatctagctttcatttcctttccaatactattccaattcaatccaaccatttgttcgtagtgatctaagctccatatttgtttatataattctaatccaccttgaaaactatcggctgtcttacttaatctattcattaacattataaatttattatctccttttctagccatagacattaaatgatttaaaagctgtcctttaattccgtctgtaatatcaatagaacgatttgaaatatacgaagataatgccatttcatttaagtgcggtagttgttcaaatgtatctaaccattttattctatgtccacttaataaatctaccataccattgatagtcattcctgctatttttgctgcactaaaaccagtatctaatatagccccagctaacattacagttgatattgctgctcttggtggtagtttcatcacaacattaaagaactctggtagtccccttctaacattattacctctaatgaattgtcctaaatcataaaataaagtttcaaatgctccaactgtttgaagcacagttgatttacccatacctatgattgagtttaatgcagagtgagttatgttagcttgctgatctccatatgttaatgcactgtgttctttatagtattcaagattatctgctatatttttagttgctgttatagtattatcaaataaatctgttcttaaagccttatctgtatcaaataaatttaaatatctttgagatgtcttattacttaattctccataaaattcacttaaactcttagctttattcatttcaataagttgatttatttgtgtcttaaattcttctggcattttattatgaatataattataaactccattaatatattcttgttcattgtctaagaaatttccagcaatagctttacctttttctttatcccaattccaaaatatatctggtttatctttaaaatattcatatccataatttttcatttgatgcacaatatcttctggtaatctattatttgtagttttataatatagattatctaaatccttaatagatttatcaactatatctgttgctaatatatcggcttgaactttgatttctccttcattatttattttaggaacagtcaatccttttctattagcttctcttatagtttgtaatgtaatataagagtgttgttgatctgttatatctcttaatccacctatgaattttcttaattctactccacctaatgcttctctttctgctaataaagatatattattatcaaatcctctaacccattgatgttgtaaatctaaggcatccatatcttctgaaaatcctaataagaaatgtgagaatttttcaaagctatcaaacctatatgctaattttcctacatgcatataattacttccaagtccagctctatctcttaaatatactctacttgttgagttatctacatcatccataaattgtaatatttgtgcatagaattgttgtattgttggtctagttgttttaccatctaatccttgtatcataggaaaatcatcaacatatttttcatatacattaaccttaaaatcttcccatttagcatctaaacttgctttgacttctggtgttaaatcatttggatcaacatgaagataaaataaattcatatttccttctccatattctggtctttttaatattaaattagttaataaatttgatattttactatcgtacatatttaaattttgcatacgattaataaataattgagatttaaaatagtttccaactccgccatctgttgaagctacaccataatcagcactcaataatttaaccaatccttcaattaaattctttttatttacaccttttaatatttcattagcagccatcatttctcttggagttaatcttccacctttgacttcatgtagatcttctgctatacttgttttataaattgacttagctgttttatacgatgtaatcatatcatttaaattttcatattgattaattaatcctttaacattatctggtaattcaatataatttaaattagcagcttgtctaatcttatcaatgatattcattccgttttttaatcttactttaccttgtgaagcattatataaatttttatttaaagcactaatttttttatctagtgcgtttattaaatcatctgtacctctaaatgtaccagtaatttcagtagatatattatttattttattaaacaactctggtgataatgtatttttattaggattttttaaccaagcattaaaatcttttctttgtaatggtgttaagaaatccattaacccttgaaaatttgttatatcgctttcagtaaattcaattttattattatacttctcaattaaacttgatgataatgcttttgcttgttctattttttctcctaactcattaaaatttactttgattttttctttgtttgctatttgatctattagcattttaagctctggtgttacttccccagtttctaaatgtttttttacaacttcttctattgtcaaatctgtatgatttcttgtagtagtagttgttgttttagttctagtagtcatcaagtcatcaaaatagtcatcaagaatttctcctctgtctaatgtaaaatttctaatactatctaattttgcattgactaattcatttggcattccagtttcaaccatttcatcccatgctttaatgatagttttattcttttgatttaaccatctaaattgttcatcaaactttttaaaccacttagagtttttaattgttttccaatctttaatcttcccaatactcttaccttttgtatggatattttggaatggatcatttgtatattgattagttaaaacatcgtgcatatctttttcaaccattctttgagcttgtttaattgtatatgttttagtttctgttttggttgtccaagtatttttaatattattgtctatattattagcatagtttaatatttcagctgcttcaattttactaagtttataagcatgtccaccttttttattcttaactttatttgcagtaacaactcctttttgaacatacatatctctattaaatgttacttcctgcatttcatcaaacttagtgtaaatagcatccataattggcataacttgatttaatacaccattcatattatacccatctctaaataaactatttccaatatattgcataatgtttacattattaacactagatattctttctgtaaatacacccatatttcctttaacatttgcatcagcatttttaaatgtatctttttctacttggaatattctaaataatggatgttctttatttgaagcacttaatttagtaacatctaattcattcatatttaaaatatattctcttaaatcagaaatcatactagcagtagtaattaaatctggattttctggatcaaatgatttaaatatagcttttacttcatcatctaacccatcaataaatactttatttaattgttcttgtggtgtaatttcataaagatacttcataaactcttgttcaacaggagaaaattgattatcaatggatatttggtttatactatgttcattcatcatataaaataaagctacttcttgtggtgttgtaaatgtatattgactaccatctaatttactttcaacagttataccaacaaaatttccatctttaaagaattgacttccattcattgccttatttacatcttccatattcattccagtaaatatatcagatgaataattttctccatttttatttaaaaatattaacatatccaacatatttttattgttaattaatccaataaaatcttcggcattgaaatttccttttagtaaattacctaaactcatttctccgtctgttcctaattttatttttttatctaatgctgcgataattctattctttgcattttctattctttgaactacatttaaagatgtgtgaaatccaatgaacttatttgaattagttgataaatccccagacttaatacctaatctattagctgtacttcttataataatttctttttgaatttcatttttaattaaactatcaatataaagtgtcattaattttctattgttttttgtagcaataattcctcttgctgcctctccttgaaatcttattaccttatctccttttttatttggcaataaaattatttgagaacttccaatagaatttatttcatctatattatgtaatttaattccaagtaattcactagatgtgtctttgatatgatattgatatacatatctattcttatttcctaattgaattgcaccagtaacatatccatcttcttttgatatatattctatataatctccatcttttaatctatctatttgatcatataatttagatacagcttttgtcttattcccatcaatagcttcaaatatttctattttatcttgttttactattttagcagcttcattatttggattagatggattatcttttttattgtcaaatttattattaacatattcagttgctaattcatctaatgtttctggttgttgattatcaaattttgtattattaatattttcttttggttcttcatttgtcttagttgaattatcttctccaccatttcccctagcttctgcttgtggttcttctgcatccacttttatgtcttcttcattaactttttcaccagcactattctttacttcttcttctaccttagcttttgattgtttaaattcttcatctaatttttctctatatactttattttgttctaaggcttcatcaatatcatttaatgcttgaaacatatctccattacttgcttcaattatagcttcttttgtcaatttatttttagctattaattcattgtaataactatttttcatttcacttataattttttgttgagtagcctcatctaaatcttttatattttctaatactctttcttttaatttactattgtcccatactaattctaatgctgctttatctttatccgataaactttctaattcaatttcatttccagcatctttatacttttctcttttagcaaattctcttttagtagttttatatttttctggtaaattatttattgtatcatctatattaccagctaatctattttcatctataaatccttctaaccctctatctatataatttcttttttgaatattaattaattcatcaaaagcatctttatatgatatttctccattatgaaatttattataagtatcatttaaagctctatctaatctaggatttttaatatcttttttaatttgttctatttctttctttatatttctttgttgagttttttgttttcttctagtattaacttctgtattatatttttcttttaatttttgtgtactaatattttcatcaaactcttttcctagtttatcaactgcattatttacctctgccttactatatgttttaccctctgtgttgttcatagtagcttctctaatgtcttgttttcttctaccataactaaatggatcttccgcgtatttgacatttgtagcttcttctatttcttcggcagtttctttaatagtttgtttaattgcttttaatgtaggttcatctatatatgttctaacagtttctcctgtcaatggatcatatctatatgatacatccccagacttagccaatatactatctcctaaataattttgtaatttagtttttattcttggaattaactcatcatcaaatttagaaaatgcttttgtcgttaaactatatccattacttaaagtccattttcctgctttaccaagtgctttaaatccatatctaaatcctaaatttgcaacaatagacatagttatagtatcaacatattcatcatatgtcatatttctattttccatagtttctataagatgtctttgatctccaatgtcttgcgttactccaacaaccaaatcaacagctatatccattccccctgcaacagcgacagatgctccaacagcaccagctattccaccagtaattacagaagcaccagtagctattagcatatttcttcttttatatttatcactaacaacttgtccaaacccaccagtaatagctgatacaccttgtttaaatccattcatttgtctatttaaatcttctattttttgttcgtgttcttgatataaaactttattttgttctaatctaagttcggcttgcaatctttgtaattgagatttattcaataaatgttctatttgtatagcatttaaatattgtcctcttttatccttttcttttttagcatattcttgaatagctttttgtctttcattaatagacattccatttaagtctggcatttcattatttggattttgttctactatttgtttatttaatatttcttctggtgttaatatttttccacttgtatctccatcatcttcattagtgtatattaaatcatttgatacatagatagtatcttgtccagaacttcttaatttattttttagttctcttaacttttgttcttttgtgatatttcttttctttaaatatccatcatctctaatcttggcttctattttaccttgattatacattgttttaatcttatctttaaatggggtattagaatgatttttatgaaaactagaattaggatcttctttttgttcttccatccatttgtatctataccattctgttttatattttttaaattggaataattcttcatctgttacagctaagttcttcatagcttcatacttagctccccatttcttttttctataatcagttaaaaaataatccattaaagcatcttcttctatttttcctttgaattgtttttctcttttttgtgcttccttttcttctctcttttttatttctgattggataaatccaccatcatcaacaaaaactggatctgtattattaactatatttggatttatgtcaaataaatcttctcttttaggtttctctactttctttgtacttaattttctatcatcatctaatatcatttataccccctattttatttagtcttataaataattcctctaacattttgatttttgtctatttttttatatttactcaaaactctttgagatatatcttctcctaatatatttgttttagcagtataagttgtttgctcatctttctttcctttatcctgtccttttaattctccttgattatactttgttctatatatttcactttgtggtataacatcttgtttcatatatttattaaatgcttcttgtgttactccacctttggaattaatactatcatttcttatttgatctgctaaattactatctataaccattgtaaattttagtgtattggcattattatttacttgtgtaacaatattattatatttacccatataatttcccaagccattaacagcaatagagaatgcttttttatctcctttatctttattgtctgatgctggtaaataaatatatgcgtttgctattttatttaaatctccattattatctggattatatttaggaaaattactgttaaatatatttgctccattctcataagcatcatcatatccagcacgaattaaagctattgcttttttaccatctttacgaacaaaatcataaaattgatctttgctaactgacttagaaaaatctattccaaactcatctctaaaccattcttttgctgaaatatttacgatttcatcttttttagttttaggattgtatctttttacttgaacatttccaattaatgaattagtaaaaaatgatttcatataatcaaagttgtttgtttctgttagcatcttatttctaatcatatcaacaactttatcttgttcataattaactaatttattatacgcctttgttcttctttctgtttccttaaaaaaattatcttcaaaatcccttgaagctcttgccttacttggattagatgaagcatcaaaataagttggattagtattatatacatctctttctaatatattcgcataggcatcatattcagcttgtgagaacacatatggattatatttatctggttgagttttataatactcagccaaagcattcgccatattacttgcgtatctatctttaatagtttgatttccgacagcactataatatctagtattggaagcatccattatttgcataaattgtcttggatcgctatgtcctatgtactctttattattagcataacttctatctaatataactttatttaaaacagcattgcctgttacagttccatcaagcatatctaaatctccactttgtgcttttgtaatatcagcattagcatctcttaggatttccctagtattttgtatagccatcatcgcttgatctttttctttttcaacttttcttttactaacaaatttatctatttcatttaatgtatcttcatatttctttttaacataattaaaagcatcttgttcatcattaaatagatttggactatttttatataattcctttgctactggtttaatgttatcatcagataatgtttctactctatttttttctacataagatttaacagcttctatatctagtgttccatccccagctgagaaattattatataaatcatttataaaatttgttttataggcattttgtaatgtcccaaaataattctcatatcctttataaatagtttcattatcatctgcgtttaaatattttaaactagaagttgctaaattatgtcctctcattaataccaaagctccatcgtttgcattaaatacatttttataatcattaactttatctaagttattgtctattcttctaacagctcttgtgtattcttctcctataaacccttgattaattccagtttgaatagcagccatctcgtctgctaattgtaactgaaattgtttactaaaattataatagttttcatctccaattttatctctgtatttattgattatatcctgttcctgtaaaagtctttcatttaaagatttagctaaattaccacgactttcttctgttttatatacatttggatctgctgtattatttaggtgccattgtttttctaattggtctagctcaaattgcatatctgcataatctatttgttgtttattggcttgatattgtccaaccatttgtgccaacatttgtccaaattgtcctataacaggacttgatgtatctacattttgtaccccaatattaacagcagctggaacactggctgctatatttaattgtggatcttgtataaaaattttattagccatttattccaccaccattttttattctaaatgtactatcaacatcatatggtttacgcatttccctaccaaccatttgatgattataataatcacttccttgtcttattttatctataaatgaaccaactccaccatctctattaattgaagattgttgcatttccattcttcctttcatcattccatcacttgctattgcttgtcctgcttccatagccccttgtaaaaatctagccatagcttgactttgttgttgtatcttatttgcagttactccaaagatagtgttgctgtgttgtattcctattcctaattcttctccaataaaattttgataagcatctctatttttaattatactctctgtcgttaatttattaatagattgttgcatctcatctttcaatctattctccatatcatttcttaaagaactgccatcaatatctataccagctccaccttgttgttgaagcatcatattgatggcagttttcccttgttgaaattgattgtccaaactattaatagcactagcatactccatcatcattttaccataattattagcataggcttttatcatttgttgccgatcaaactcaaactgtttatctgccattcctctttgtatcttagcaacttttttggcagcacgataatccatgaacccttgaagcatagacataccaccattaattgcacccataattgcttgtggactcaatttctattcacctctcttttgcatattttcaaacattctttttaaacttgtaggaagccctatacccattatagcataattatcataaattgtcaagccttcatgccctataaaaaatgatataagcattgttctagtattaagtgtttgattttcaattccaaaaattccatctaacattacacctaacacaactatccacagcattcctactttctgtaatatactatctattctttgtctttgtgttatattattctttttcttaaatgataaataaagtgtagtaaaaaattcagttatcattacaataaataaaaattccaataatttatcttgaccacccaaagcagaaataataaaagataaaatacttccaactataaaattaagagtggtaaaaatatgatcaaaatccatctataccacccctaataaatctctcattttaccataatattctatggcttcatcgcttttatcccatattgctttatcttcatatccttcattttctaatttatgttgccaacatatactaccaaattgtcttacagctaaatacattaacttagctttaattttatttactccacactccaacataattttataaaatattttatctgctaatgtacgattaattccagtattattttctttactatataaataatcgtgtacaacagcagctgcattatgttttccaaatggagatatagcaaaccataaaggtctaggacttgaagctaaatttgtcctaaacccttttggtacatgaatagtaaatttattatttattgtataatcaaaatcttctgctaactcccaatattcatcactcactgaaaatatttttggagataacatactattcaccttatttcatatctttgtctgccttaaattctggttgtaacattgcaactaatttattaattaattcaatactaataaaccatttgtatggagcaggaacaaatgattttgcattatctaaaacatattgcaatttttcttttcctttcccttttaaatcaaataaatattcagctttcttaattaaccctaataaagcttctctaccttttgttctcaatacatatatcactaatcccactatcgctacaaataaaactactgtactaataaataattgtttgtcccctaatactttgtttactaattccattcttttacacctcttatttttttattatattaaattaaatattttttctttttcttgatttatattactaaattttacagcataatcatttatcatagggtctttaatccccaatgaatatctatgcattgcatcaacctcaattggtattattagtttaactggttcatttcctatttctaccaatggtttatttattttttttgtttcaactatattacctaaatcatcatgaactattaaatcaaaatcccatccatgataaaaccttgatattcctttattttctatttctacttctatattatctggtaacaccttaacagacttgataaataatttatatcctagcatatcagatatctctttactttgtacattccatttagcatcattttctggaattttttgtcctataaaaatatgatgagatttatttattaaatcctttgttctatttaagttcttcaacaacatatcttcatcagttaatgcagaagtaaattctcccccgacaggatacttaccccaaatatctggcatagggactattgcatctgtttcatctgtttgatcatatactccacctttttctatccaacctaaccaatcttgtgtatcacttggcatacctatcatatcattataagtacctaaaccatattctttacaaggagaaaaaggtcttctcatcataattttagcataaggaaatttccctatccacatatctacatatttcttaagtatgaacattttaggcaatcttctaactttgttattatcaaagtttacatgccattccccccaatgtcctacaactccaagttgaatatagcttataaaaggatcttttccatatctttcagctaatttatctataaatacttttaatttatctatgaatttttggttctcatagtatggcgaccaacctttaccatattcatgactataaattttacctaatgttttatccttatatataaaagtaggcacatcataatgggctttatcactaggttcatctaataataatctaaatacacaatgtttccctttgtttttccagaattgataaagagataatttctcccaactttcccaatcatatttatcttcatctttatcttgaacttctttccatctcatatcacaataaactaaattaaaatctatatcaccaagactttgctcccatcttccatatggagcatatccaataagtggattgctattcattggttcatattgaaatttatttttatctataatatattgtcttggattaaataaatttttgtgataatctttattaaataaatattctttaatttttaacaatgatttctcaagtttgtgaatatataataagatattatgatccatagaaattgatatatttggagtataatatacataattacttacggcttttagtatatcatttctattatcaaatatatgagataatatttcttgctcatatggaaatgatactatcccatcattccaatcatatagatcttctccttctgttaacataaattgactaaaataaattttttcatttacattatctggtaattcaaatcttggattagcattagttgtattttctgcaacaaaagaataagtaagccttttccattgagaattaatactaaaaccttcccaatcatttttaacaacttttactccactgccattcaaaaatgcagatatacttgtgttatatctatgtgttttagcccaaacactaaaaacatattttttccctttttctaatgttatttcttgcccaattcctgtccaatgttttattattgaaacaacattgcactcattcaatttttcttcttcttttatatatgcatccgaattaagccatgtaacaccttgggtagaaaagtcttttgtatttttaaataaatttccaccttttttatctttaaaaatatctttgatttctttttctttatcttgtcccttaataaaatttaaatattttttatattttatatatacaaatgtagcaatattgatatcaaaatttggatcatctaaatctatcacttctaaattttcatttgttaataaaaatggatatttaaacaatttaatatttttcccccatacacaagtatttttaaaatatatttggtcaataattctatttctataaaatacactatctatttcattaaaatttatattactcattgatacacctcaattaaatcatttctctttctatcaagtatattttatgagggtcttttttaggtaattgatcatactcttgttttctcaatacaatcacattattgtcaaatgcttttagaaattcatttataaaatcttttgtttgtaaataaggagttaaatcttgatgtttaatatctaataactttttaaatgtttccaatgaagaactagttttgtcaacatccccatttattctatttaatatagcattaccatctaaattttccccacttggaaattctatctctttatgaaaatcttttaatgtaaaagttaattttaccttattaccttgtatagaatgagttacattaaatgttttcatatcttcgttaacttttgcatttactgtttcttttactttttctcttattatttcatttcctttattattcataaaagaatttaaactatctgatattaatttaatcttttcatttgtaataatatttacttgattagtaaaagaattaatttcagcttgtttcttttgagccaattcttcttgaacattttttaaaatattatcctttgctttttttacagcttctccaacttcagctgttgctatatcttcaactttctttttgattaattcatcttttgacgcaatataatcatcaactttcttttctattgaagtatttatattttttattttttctgttaaaaattcatcaatcttatcttttaaagtctttaataatataggaattgatttttcgaataatacatctatctttaattgaactttatttgaaattacaccatctaaattatcaacagcttcttttgctttctttgtaatattttcctcaatagatttatttttatcaactaaataatcatcaactttcttttttgtttctataaataaatttgactttacagattctccgtatgccctaatttcttcttttttatcattagcatatccgcctagttgagtttttaattttgtcaactctgacaataaatcatttattttttcatttttatatatttctaaaactgttttttgttcatttgtataatcatttaagattcttttttgttcctcagttttttgctcaaattgctttttatacatatcagcatacatatcgatcatttttcttaattcttcgtttacatttgtaatagaaattgcttcataatgatctcctttacatatccataattcatcactttttaatttaggaagaattagatgcatttccatactatctccaactaccatttgtctttttgtatactcccataattgcgaaacggtattcactaatatgttatatctatctactaaaacctttatatctgggttaaattcagttacataagttaaacttttattatcataccataaagcaacttgaattttagaataattaaatatagatgggtctactactttaaatacataattcccattatttttaattaattgataccaagcctttggtagttctttataatttccagtaattttatctaatccataaaattccaaattattcccaactataccatttaattcatagtttgtagtagatgaattaatagctatctcttttactatatatgagatatttcttaacttcgccatttatttaatcacctctctataatctaaaaataggggatagaattaactaccccctatcctacacctaactaattattaagctttgtataaaaattcaattatgctttctggttctattacagcaactcctaaacttcttttaactctacaagctatactatcagttgctaagtcttcccaagattttgcttctaagtcattttcccaagaagctaccccaaatgtttgtgtaggtataaagtatatagcatttataccagttccaccattatcttttggttttgcatattctgatacttttacaacttcacaagctaagaaagtttttaaacttgaagttccttcttttaatccacctaaatagttattagaagctattttttcaacagtgaataattgtgaaaattcttttgcagttaatactaatgcaactccattacttccagtagatgcagtcatatctttaacatttgtagcagcataaacagctgattgaattaatgcatctatattagcagtatcagttaatgcttttgttctatctcccattggagttaatttaccagcagcaggcgtaccaccagatttcttagcaattattgctcttaatattttcttatctacttctcttgctaatgcatctgataaagatttaatataagaactttctaaattgatagtagttgagtttatatcttctttctttattctatcacttgcatatatcatttctattgtagcagttactttttctgctgtaccaccagaacctgtatatgcgtccttatacatattaaaatctcctgcattatcaactgtactttctcctaatctataaaatgtatgtgtattagcaccttttacaactgctttttgtccataccctaataatagatttcctttttcttcttttaatttttgtagcataacagcttcaaactgagcttgttttgcttgggtaatattatacgccattcttttctttcacctcatacggacatatatgcacagaatatatacatataatcctttctttaatttaatttatttattttaaaacattaaacaattcatcaaattctcctaataaattatctccaatcattcctcttaatttatttatttgttcaagagtttgttcttttgttacacttggttgttttcctaaccaatctctataaaattgcatagcttgtaatggttgtatttgcattttattttgtacattattgattattcttggttcttgtgtcttaaccccattatttttcatacttccattataaagtgcatttaatacttttatagatgttggatctgtaaacattccatttaataaatcattagttaaaatttctgaattgatgtttgccttaacccaatttaataatgtagggatattcattatttcaactcttgataaattagcttcaagatttgcttttatctctgctggtgtcatagcttcatcactataattgccttgttgttgcatttctaccatagcagcttgatacccttcattatattgttctagtgaattaacagtatattcttttatttgttcatcactataaccataaccttttaatctttttacttcatctaatatttcttgtcttccttctggtgtttcaaaatctaagaagtcttgaaattctgctaaatctactccaccaaattttgtaccctcaattcctaatccttccaacatttcatctattccattttgtttgcccaatgtatctaatacatcatttaataatggattatctttgtcagctggatcaataagattttgttcatctaaattatctgttttaacttcttctatatttcctacatctccatcaactggtaaaccaaattgatttatagctggtttttgttctattggatttgtaggatttgtttcattcccttgtaataatggattttctacattaccaaccttatcttctaatggattttgtaatttacttttatcagctggatctgtatttacattattatttaaaggattttgcacttgtccttccattaattacccccataattactttcttgatatttagttatttgatataaaagcatatcaccaaaattttcatatactaatggctgtccactagctttgcaatccataacataaagtttgtatatggtatttgctaatgaaatcaactcattaaaatcatcatttgtagcaaattgcttcactaaacttaaatatctatcttcgtatatttttattctttttgtttccatttactttcctctcatatagtattatcgtttttcattttgtttatttattttactatattttaataattttattgcattgcttctaacatagcttgttgttgtgcttgttgttgcatagccattttttgttgatcattagcaatttcttgtcctcttaaatcatttctttgctgttgcatagccatcgcctgcatttcttgttgttgtgcaacttgttgttgttgagcttgttgcatttcttcatctgtcattctaatttctaatggtatacctaaattatcttggaaatatcttaaagtcttttcaacttttaatccagctgtttgagccatttgtataacagcaccagatgtttgtatataagacataaccttttcaacactttgtgcttcttggtttgtagccaaagcattcttataattgattaatgttatatctaaatctcctagctcaaattctattttcttttgatgtattaatatacgcataggaattaaaaatgttggtgttaaaagttctctttctataaactcaaaagctctactccatttttgtcttaatgctcttaatctaatttcactttcaccagcacttcttctcttatattcatctatttgtcctaatggatgtgatgtataaagttctctaattgcttgtttatattcttgtatatctttatctaatggaagtaaattcccaacagtttgtattggttcaaccttaactccgccatttaattgactttgcataggtgtcattgtaccagtatagtttactgccttagcatctaatgaaagcatttgagctaataacttatctccttgtataaacaaaggtggatttaataatttttcagctgatgcttctctttgttttttagcttgttctaaatccttaaacacctttaatccaagcatagacaaacctaatccatttggattacttccttctttatcccatctaaatataactattggacaataatctaattccttagacatcaactcctctcctaaatcatcagtgaatacttgatacataaatttattccctaatgtatctcctacacctaacccacttgtattactttgattttcttctattggtgtaattacttcaataacagagaacatatcctcattaggatttttagcgtcttttggtactttaatttcatctccaaacattaactttaatccaactgtattaatatttcttacatacttaaatacataatatggtctacctaaactatcttcccaataatacaaatcatctaatggtacatattgaaatataaaaggcattatagggtcaactttttctgtaaccctataagctccaactcctatatttacacattcttttaatgaacgtccaatctctgcataataattagattgatttagataagtataagtaacatctgtaatatcttctaattgtttgtttaatctttgtatattatcatttgttacccaatcactttcatatccattaaccaattggtataatttagcattcatttcaacactagcccattttgttgttctactaaatacagatgacataagaaatgatacaaggtcatttaaagatgttggtattaaactatctatataatttggttttaattcctttgttgtactatctgtaatttgataagttaaatcagtatattttaaaacttcattatatattggtttaacagcttccttagctttttttgctttatctaaataaaactgtatcgttactttatccatttatccctcttattttttcatcatcattctccttaatctttctctgtaatcatctaagtttccaccattgttttgtgcatttccttgatttctttttaattcttcttcattgataagcactccacttccactattaccagaaccaccattgtattcagttttcttatcagttaaatttttatcttgatcatcaagattatttttcatttgttctgttcttcttctttcatctgcaatttgatcttcttgtttttttcttttatcattaattgcatctaattcatcctgtcttcttctagcatcatctctccattgttcttctcttttagcttgatcttccatagccttagccatttctttaccttgtctaaatggagataataattgttttcctgctttttctattggttggaatattcctttccaaactctttttgcagcacgaccaattcctaatccacttctaaattttaatctaaatcccatttttcacctctctataaggattatcttatttgccctctttcttgaagtattctacttaatcttctttttatatcatcatcatcttttatatctccatttggattaacttgacttgtaaaatcaattccttttttatctataccataactattttcaccagcaccttgtccatttccttcatcttgtgtttgatcaaattttcctctttctccaatagcttgatttaaagcatcatacttagatttttcagcttctctatttaactgttcttgttgaatagctttatttttatcatctattgtactttgtaatccattatttctttcaaccatagctttatattggttcatcatttgattgaattgattattcaatgtcccatattgatctgtcatacttttattattttgtgctaattgttgatattgtccatttaattgattatattgattttgtaattgtccaaattgatcctgtaatgctttatattggtttggatctattccttgatatccttcaccagcaccatcatcacttcttcctctaccagttaatccaccaataaatccaccagcacttcttcctaatctacctatacttcttgttgctctcctaaatgcccttctaaatcccatttaattcacctctaattaatttttaatattgtctaacactttgtttacatttaatactttaataagataattttgtaattcttccgctatattccaatatttataatatgtaaaatatttagatatacaaaatacaacagcgtcatattctggtattaaatccatttctttatatgtaaaatctttccaactaccatgcatatattgtattggactttctgcacacatttcacttccatcttgatgtatccataaatatgaataaatcaaattatctttccttgcatacttaacccaattctctatatttaacttactatcatcttgttgatatgttatatcgtgatgataatctatatttgtgcaacttgcattattgcaaccccaagacttcatcaaattataaatttcgtcatgttcttgtataatacaaaatttcttaacattactacatttcttttgaattaaatctttaacccataacatagcttcttcatctacaataaaatcttttttatatttcattttagcaatatcccaagctaaatttggatcttcaatttcatcatcaacaaatttttgatattcaattaaatctttcataaaaaaatctatatcaatacttaatatattttttatcaactttatcctctcctactatttagtaaatataacaccactatcaaaactatgtgcttttctatatttttcgtataagaaataaatagccaaatattctaaactatccgcatcatttgaagcactaaatccactaccatgttttggtactaaaattggttctcctgtaacagctactttccattcatatgatttcaatacatctgtaaattgtcttacttccatattattgacaaattgtatatcaccattttctattccagttcttgttatctctattgccctcaacacagatatatgatttaatacagtaaccttaaatccagctgcacgataaacttcacttctacttgctaaatatcttatataatccatttgacttccaccatcttgtggtaatataatttctatcatttgttgtgatattctatatctcatacaaaattgtttaatataatcaatataatactgtgttggcttttccctatttctatgttgatgtataattttaactttattatcttcatcaaaaatagcaaatgtcatagccgtattgtctgatatacctaagtcaaacgatacaaatattggtttgtgttcaataattggcatatcaatccaagttgcctttttaagcgatttaccataaatagacaattcattaaatgctgtcatatcacacatataatcagaagcaaattgttcttctgacataagagttttaattgtttctaattctttatctgtataaattctattaccatcattatctattgcgtcatatgctgtgataatagatttaattatatctgcttctgggtttaaaaattttctattaaaccaactatttagtcttggtgttgaaatacatattatttctccattaacttttcttgtagatggtaataaataatcaaatgtactttctctaacaactgctgcttctgatattatgagcatatttaagtttgatcccaaaattgtatccgcatcatccccataaatatctatcattgaaccatttttaaatttaatacttccatcattaaagtataaacttcctgtttttgttgttttaataacttgtggatctacaacactttctatccatctttgtccatctattgtaattccttctaatatattctttctcccttgctttgctgttggaaagatatacattacacggaaatttggaatatttatacaacactcaactgccctagaaaacgcccactgatctttaccaattcttcttgaccatgaaataaatattggttttttttgtccatcattttttttatattcttcttctattctttcatctaattctctttgatatggtcttggaacaaatcttataggattaaatgttttctttctctcagttgcatacaaattcattaacacatttcccatatttaattgtttcaaagccatatcaatcaccttcttttaattctacaacatttacattttgattattgacattagcaacccttaatttagttatttcatcatttgccattttaaatgtttgagttaagatggctatatcttttggattttgatattctcctctccttaaacaagttaatgatagatgtttaatatattcaaaaacatctattgttccatatatatcatttacgacatctatcataaactcttgtaaatcagcacttcttttgagaatattccatttaccttgcgacatatgttttttaagttttctttcacttatatcatatttggtagcaacatcttttaatgaaatgtcagttgttatatactctgctcttgcttgtctaatcttttcatcaacatctaaatattctggttcttcatttccaacaaccacagctgtttctataactaaattattttctttttttttagtaggagatgattttatttcttcttctttactttcttttttttccacaacatcatctaatgatattgtagctactatttttttttcttgcaattaattcacccccttatttattttaaccaacagttaattccccttaactctattgttctatctccaacaaaatcattctctatttgaaaatttggtaatggtggatacattagatttggattaccctgtctttgttttcttaaatcatcatatcttctttttaatttaattctttcttgttttgtatacatatataaatcaatagtaaaatccataatagatacactgcctttaaaatcataaacattataatctcctatttgtgtttgagtaggttgaattaattgtttagctataaagacatcttttatatatgaattatttttattaaatatattcattgaacatctattataattttgagtaaaatcattttcgtatactccaccaaaattagtttgtataaatggtaaatttaacactaattgagaatgtaacatattaaatggtgtaatttgataatatttacttccacaaattaaatcttctccatatccaataattatatctgtattttgaaattcaatggttgttcttctaaataaattttcaccaacatattcaaacaccttaaattctttcgtactattattagttgtacatattaaggaatttctattatttattacacttttagttaaataaatataattaaatttatcgtgagaatatttatcaactgtaatattagtaaattgaacaaccccattactatatgttggtattattgaacgaagtataccagtaacatctatataataaagtatatcatcaatcaaggtagctattgctgttggattatttgtacttgcaattcttatattttgatgttgagctgttgccatttcaccataactaaatatataaataccctctgttgataatacataaactccatttccagaaataagtttcattatatcactttggtttccttcaatagttgatggtttaatataaaatccactatcttgttctacaccagttctaaaatctgttatatccaaaaccttagaaaaatataatttatcctttgttgcaatacataaacgagattgaaattcacaaaaatccacaatattatttaaatctttaataaaattttcttgtgtaccatatgtgatttcatctgatacttctattgtttgtggactatcaaaatcccatttagcaaataatttagtataataatctccaccatattttacatctgtaactctattggcttctctaaattctaatggtctaccatctataaaatatccttgtcttttatatttatctatcttattaaatgtactcattacaagaaaataatccccaacagccattccagtcgttgttattgtatcttgacttaacgcctgtctataagtaacatacaatctttttattggaatattaataccagcaacagttatatctccattactacttaaagataaacgaattgtattatctctaaacgaagtaataaatactggcattataattttttgtcctttaatatctaattgttcaaataacttgtatacatcaacagtaatacttctttgtgattgataaggtattttaatttgtgaaaagaaatcaaatgtacctaaaataccattactattatatgtataattttttattgcattatttttcaatttaataaatatataatcttgaaaaacatttgaattacaaaattgatcaaataactttttatctccatcaaaattaattttacttataatttttttatttaacttagaaactgtgtatatagctttctctcctattgcaataaaaaaagaatacttagtattctttatttcacaaattttatctgttaatggaaattcatttctaggtatatgttcatatccaccagtaaaatctattatatctttttgttcatattgtttagcaacttgaagtgttcccatttcactaacataaaaattaactatttttgtagcactttgttttgctatatcgctatctctaaacccatctaatgaatgtccaacttctccataattgaatacactttgataagtttgctcaccagccatttaatcacctctccattgggaatggtaacccttcttgtgttacaatcctatttgtttcatcaattatatctctatctaacattggtattttttgataatatccatcataaacctctgctaatctctttgctaatttaagtataactaactttttgagataaagaggataatcacttaaattcatttcataacaataacaaagttgaagtgtatcatttttagaccaaatgtattcggcttctattctagctttaaagtcagatgtccaaaccctagacaaataatcattaggtttattatatttaaattcacctctaaaattagtgtcattactaaatttatctaattctattgttctactattaaaagtaaaggtagcatcgctacctaaatccactataatatcattaaataattgttctgctattaataatctatctgatatattattatgatataattgatgttgttctcctaattttaagaaagctaattgaattatctcatctttattcaatcttgattgtggcataattaatcacctttctttttatttttctttgctttatcaaaaacttcttttatttcttcttttgttaaaggttcttttttatcaactgggattaactcaatttgttcatcttcaacaatttcttctttcttttcttccttaaattcatctggtttcttttcttcttctttgtctttcttaattttttcttttcttattttattttcttctgatgtcaatggagtttcatcatatgttaatacaccatctgcatttccccaaatcttatctaatataaatgtttctaataaagatttgtcctcaacaccagtaataacattataagttattccaccatcaactttaacacttaatgtatatttatctttcatcccaacaccaaatgtaaaatcttttgatatagtacaagaacttatcttatctactggaacataaatatcatcaaattttaatactcttgccattttattcaaacacccccatttttctataatttacatacccaagtttccattcaacaaaatcttcaaatgcaatacctaaactgccatgtttttcaattaattggacatacatattgtagggaatatatatacccatatatctagccataaattgttgatctaatgtttttaattttattttaaataatccataaaatctaccaatgctttcattgtatttatcttttgcttctaaaaaacatagaattgcatcttgctgtaaatcttgtaattcatcttttgtatgtaatctttttcctttctttttaacccataatatagacatcgccaaacatttttccctaaactcatcaaaaccatcattccacttagttctaaaatattgatacaatattctatattttctaccatattttgttttcatttctaacctcttttaatctctatatagtattatcgttttttattttgtttatttattatttaaaaaatacataatttccccataatacattatactataaattatataaaatgtcaacttaaaaataaaattatcatttttgacaaaaaataataaacaaaataaaaaacgataatactatatagagagaaagggtatataaataaatttgacaaaataaaatttatatactataatacaattaacaaaataaaataaattattttgaaaataggtgttgacaaattaaaaattatatgttataatataattacaaaaagtgttgacaaatatttctttttgtgatataataaaataaacctatatggtaagtaggttaatcggtaaaacctcgttaaactaaaattagccgactgagggttaaaggtaatgtcccaacagaagcaaaaatccaatgtttaagtttacaacctttttgctggggagtttcagttcatttaaaaaacaataaatagtatgaaacatatttaataaagcaggcgaaataatgatatgccgcacaaacaaaaaaaatataaaaaagattaagtcagaagaattataatggctaaccaataatgtcatgtaatttaacagctagaacgaaaatatctctgcaatatattatgatctatttctacggtataatatattgccataaaaaaagaatagtttttggctactaattgaaaaagaggataagagatatgattagttgaagggggggttgcatcgaacggaatggttctaggcggaaggaaaacgactagatgttagcatgctgaatggtttgaggaagtagaataacctttaaattcagagatgcccattgctctcctttgggggtatatatagaaatatatataggtgtttaaaaataaacaccgatgaacatgtaaatatgttcctagctctacccgagaaatactactgcaccgttcccttagctgaattgggatctttttttttatttctcttttcccacaatgaagtagagctgggtcttaaaaagatgtatggtaatggtagacaaatctattataagtaattcattacaatgtaaaatatctgaggacgagataagatatatccaatatgttctggtacaaacatacgcaaattggttcatacatccactacggggatttcaacatagcattattctagtgattgttgatgtttctagtctaagaaacaagggggggagtgtgtactaaaaccatataggttagggtgtacaagagaagcaaagcaaagtgaagaaaaaaaagtaaagaaaagaaagcatgcatgatagttaagtgggactatgatcattgtatgtcgtacttagttcactcacttgcgttcgttcctaagcgttgtaatgtgtacttaacttcgcttcgcttcgctacactcgttaagatactacattacacccaaacaaagcaaaatgtattgatattaaaaagaaaataataataattaaatataatataaaataaatatagagagtttatgtggagcaatgagcgtagcgaattgcgacaaactatataatataaataaaaataaaataataattgacaaattaaaaataatatattataatatacttaaataaattataaaggagatgatattatgtttaagttaatagattggttaggatacttaataatatctatatttatattatgtggtattggattagttttattaatgtattgtataatatatttaattatagaaaggagatagataaaatgaaaaataataaaagtcaattaatattagatgttatagtgagtggattaataatagcttatttatatttagttttagtttaaaggagttgataaatatggaaaaaagaatacaacaaattataaataaaaatatagaaaagaaaatagaattaataaaaaatttaagaggtaaaaaagataaagataatccaataatggaatttaataataattataaagataaaatattaacattaatagtagatgataagaatgttaatagtccttatgttaaagctatccaatctacatttaataaatatttaccagatgcaataattaagtttgttaatgtaaatgaaaaaatgagtagaacagatattgcaataaaattattgagtgaagttgatttattaactgaattgaatggatatttatttattcaaccatctataacaggacaaaaaactatatgtattaaaggagatttagataacatagaaaattataatgatttatggaataaatttaatttaactataacatcacaagttataagtgaaattatagaagaatatgttaaagatataaaaaatccaaacatagtaattataggagatggattaacagttgggaaaccacttaacttatggtgtcaacaacatcaagattggaacacatatcaaattaaagaatgcttcaaagaaaagtatgatgatattccagatgaatttaaagataagatattagagaatgcagatattataattagtgcaactggaaatgcagaaagtttaatggtagataatgttgcagttatttctccaactatatattatgaagcatatagtggaacttatgtacacgatttatatagaggttgcacaaatagttgcgatacacatactgtattaaatagtataggaacattaactaatcttgaattatgtattagatggttaaataatgttttaggaattgatagtaatgatagatttactattggaaaataaaaggagatggtttaaatgaatgatttacaaattatagaacaaagagaattattaggaaaagattttaaaatttatggtgattttgataatccattatttttagcaagagatgttgcagaatggattgagtacgatttaaacaaagttggacaaatgttaaatactgttgatgataatgaaaaatttatctcaccactacattatagtggtcaggttagagatatgtggtttttaacagaagatggattatatgaagttttaatgcaaagtagaaaacccattgcaaaagaatttaagaaacaagttaaagaaattcttaaatcaattcgtaaaaatggtatgtatgcaaaagatgaattattagataatccagatttattaattgcagtagtaactagattaaaagaagaaaaagaaagagtaagacaactacaacaaagagttattgaaatgaaaccaaaagaagatttttatgatgcggtaactcaatcaaatgaaacttgtgattttgcacaagcggctaagatattaaattttaaaggtattggtagaaataaattatttgaaatattaagagataaagaaatattaagacaaaataatcaaccatatcaaagatatgtagatagtggttggtttaaagtagtagaagtatcatctgttgatagatatggtgatttaagattattttataaaacaataatttatcaaaagggattagataaaatatctaaaattttgttagatttaggttatgaaaataaatagttgacaaataaaattttatatgctgtaataagttataagttaaaaattctacaaaaacagtcaataaaaaaaatagttgataaactaaaaataatgtgctataataattatgtaaagcaaaattaaatttcttggttgaaaaataatgcttgacaaagattaaaaagtatgttataataattatatagaacgagtcagcaattaaataattggttaatattctagtaaaatcaaattcgttctatgttaaatatgcagaacataacagcaaaatatgtatgaacaattaatagaagaaaaagggatgatattagtttatatgtgttctggtatacgaaatatgtggaacaatacagcaattatattgattaaatatatttgtacaaaataattgtgaacacattgtttcctttaataatgaaagaaaataaatactctatgttccacaacaaattttaatgagtgtttatggaaattattaaatagtaatgtggaaaagtcgcaatatatgtggtagatataaaggatattaattactcacgacaaagagatattgagttcattaggcatagtaatcactcctttatagatatagatttattctttatatctatcaattattggggattagctcagttggtagagcgtttgtctgttaaacaaaatgtcattggttcaaacccaatatccccagccatattcaagagtagccaagcggtaaggcaacggactttgactccgttatgcgaatgttcgatccattcctcttgaaccaatagttaataataatttaaccaaaactataaaataaaattatataatcccatatagtattatcacccattatggttaaattattaaatataaataaaatataaaagaaaaggagatggttgtatgaaaacaacagaaaaacaaattgaagatttagcaggattagtagtaggagctttattagcagatttattaggtgatgcaacagagaaaaaagaaaaaacaccttgttcttgtttagaagaagaagataaagttgaaacaccaaaagttggtaaagtgtggtatgtagtagttgatggtgaaggagaatttgatggagtagttcataaaacttcaaaagcattagatattagagaatttaaaggtaaaactattgaagtctttgataattattcagaagcaaataaaagaagaaatcaactattagatgaagacttagatgaagatttatatgattaaaattgaataggggtattacttaggtgtgatacccttttttcaacaatgaaaggagatgaattaatatgggatttttacttggaatgagaattttagcagatgtatttgtatcaagttattggtttggctttggtgtaatattattaacaagctgtattaaaacaggagaaatgaaagcaccagttgtaacattgtgttcattacttatcgcattaggcttattttatttaggaagacttgttgtgaatttatgtgttaataaaaagaaaataaaacataatttatttttaggtttaatatcattggtattggttatagtatattttatttatatatttgtagatccagatacaatgtatatgaatagaactttaataatatttacttttatacaaatgttttttggtagtatagaaattgataatggagatgataaaaatgaaaaaaattaattatttaaaacataataaagatttaccagatttacagtttaaaaatggatatggaaattcagttgcaatagatttatatgttgcagaagaaacaaaagttgaagttggagaatttgctttaattaatttgggcgtatcaattcaagtgccaaaaggatgtaaagcagaattaagaatgagaagctctacctttaaaaattttggattaattcaaacaaatgcaatcggacttatagatacaacttatagtggggttgaggatattataaaattacctgtatttgcacctataaaacaagaagatatgataaattataataaatatggtatgttaagaggtattgtaattccaaaaggtacatcaatatgtcaattagagatattaccttgtatggaagaaatggaatttaatgatatggtattagaagaatataaggaatataataagattgctcgtggtggatttggaagtacagataaataaagtagttggtatattatgatgtttatagttttattttgtatgttatttttattattttctagtaattttatggatgaataaggagaaataatgagtggattgaagtgtttggttttaatatttttgttggttttaggttgtactataatgttagcagctatttatgatagtgatgaattagattggagagagtgatattatggtttatggtatatttacaaatatttataatcaattaaaggaattacaaataaattggattagtttaaatttcaaagaaagatgtatggctattgtaaaataccatagactatacacagaatatataaatttggtttatgaattattagaatataactatgaagactatgaaactcaaatatttattattgatactgagttattagagtttgagaagtgtaaaaagagattttatcaaacaatgagaatagttttagaagaaaaaggagttggtagaaaatggaattaaagttatctattttaggaataatcaaagtttttattgcaataccaatggcagtattgtttgcatctacaatatttgtgtttgtaaaaatatttgttggttttattaagggagaatattattatcaatcaagtggaacatttgttaatagtagaattaaaatatttggtatgttattttggactatattatggggattattgtggcttttgatattatgttggtgtgctggaataccatttataaaaattattatataaaggagatatattattatgtctaaatcaaaatatattgggaaagaatttaattacaatagcataaatgatataacaaaatatgaattatattctataaatatgaaattaaaaggatataagttaaaggattttagaatgtatgatattgataataaaataaaagtatttgctttatttgaattgaaaggagaggattaatatgttagttaatagttggagattaggttatagattattattcaaattaccttattggttatatttacattttaaaggtaaaaagagaataaagaaagaaatgtataaatttcaacacataaatcaattaagagattttatttattatttagaaaaatatggagatagtttacaaaaacaagggtataaatatattaacttatatggaacacctaagttacatggaacaaatgcaagtatagtattttataaaaatgggacatatcaagttcaaagtagaaataatatattagatgaacatagagataatatgggattttataaatggttaaatcaagatagaattcagtatttatataataattttaaatatttatttgataaaaagggagttcaagctattgcaatttatggagagtatgctggtaaaggaatacaagctggaatggctatatcaaatatggaaagattttttgctccatttgcagttagaataataacagataaagatgattattatataaaaccaagaagtatggattttaatttatggaatgatgaattaagaatttataatttatttaatccaaaatattttattaaagttaatgtagataaatctaatttagaagaagttataaacacaataaatgaatatgttaaacaatgtgaagtagaagataaatttgcaatagcttttggcatggaaggaattggtgaaggaatagtttgggactacgaaattgatggtaaaacttatttctttaaaactaaaatagatgaatttaaaactaaggcacaaaaagtcaataaagataaagctattgaagaaattagagaagataaaaaaatagttgaatattgtttaaatgaacataggcttagacaaggaattgaatatatgaatgaaaatagtatagatactacaattcaaaatatatctaaatttataaattgggtagttgaagataccatcagagaggaagaaaaatttattttagataatggattaaatgaaaagagagttagaaagttagttggaacagaagcagctaagtggtataaacaacaattaaatacaatatttactgtaaaaggagagtagataatatgggtatgttttttagaagttttagtgaaggagatgctgaggattattatggatcaggaactatatctgataataaaaaaatatataataatggctatgtggctggttattctagtggaagtagtgagagtgcttctagtaaatatcaagaaggttatgatgaaggatattctgatggatataaacaagctataaaagattttattcataaaaataaaaaatccaataaaatatcatttaaatatttaggtggtgattttacattaaaatttattacaaatgaaaataacactattactaatgttataatttattgtgatacaataaatgataaagaaaaagatagattaaatttatggtcaaaaatgaaaacatttttggatattgatttagaaaaatatttaaaagagaaaaacctacaaatagataagtatattgatactaaaaaatataattattataaaggtgctgtaatatataaggttaaagttggggaatataaatattataattttgataatgatattagagatttaataaataaatagaatgaggagtgataaatatgagtaaaccaagatatgtggcaaaagaacacaaatataacaatgaacatgaaagaggattatttgacaaatatttaaatgagatggctaataatggatataaattaactcaatttaatatatataataatgctggtacaatgaaagtattttcgttaatggaattgataggagatgataaatgatgaatgaaattttagatttaggaattaaaaataaagatggattattagttgttagtagtagaattattgctaatggattaaataaaaaacacaaacatgttttagaaagtattgataatattataagatttgggttggacgaaagttcgaccacccctttattcatagaaagtagatatattcataatcaaaatggacaagaatatagagaatatctattaactaaacaaggatttttactttatatgtttaatgttcaaggttataatgatttcaaaataagatatataaatgaatttgatagaatggaaaatttgttgagaaatccatttaataatatcagtgaaaaagaattattagcacaagcattaatgggattaactaaaatatcaactgttgttgatagtaatggagaaagtcattctcatatgaaatggacacaaaaaggtaagaaatttatttatgacacattattgaaattaggttttattaaaggagatgatgaatgatgacatttatagattttgtatttgtttatggaataataatatctgtttttatttcaattaattgtgcatttataatagatagtatcaagaatgattatggattaaaagtaaaagaagtatttaagtcttttattaaaagtaaaggaaatccatatgaaaatccagaacaaggacgattaaatatggctatttggggaatggtattgttatttataaattggttattaattattattatatttaataaataaggagagaattatgagtaaagaaaatcaactagatacaaatagattatattatcaatttattgaagatgatgaaaattatacatttgattatggagtaaaaatattacttccatatattcagcacttaaaggataaaattatatggtgtccatttgataaaaaatggagttcattttgtagaatacttaacgaagatggatttaaggttgtttatagccatattgatgatggttgtgatttctttaaaggagagccacctaaatgggatattattataagcaatccaccatataagaataaaagaaaatttatagaaagatgtttagatttaggtaaaccatttgcattattattacctattacagtattaaatgatgttgttatgaatgatgttgcagaaaaatataataagaattttcaattattgatacctagacaaagaatggaattttataactttgatagggaaattaataatagaccaagttttaaggcagcatactttggatttgatatattccaaaaagatttgattatgttaaaggaaaatgaaatgaataaaagagatactaatatagaaatatttgaacaagttaaaaaggagatgattagaaatgagagttgagatatttggagaagaaactaaaagagaattagaaaatgaaataaataaatttataaaagataaggaagttatagatattaaattttctactgttaaaagaaatttagggtattattatacagtatgtattttatatgaatttaaataaggtgtgataaaatgaatacagaagatattaaaatggaaaatgttattacagtttatggaaaagataattgtagtaaatgtcaaagtttgattgaaagattaaaagaattaaataaaccatttgcctataataataatataagtatattaagaagaattggaagtcaaactagaataatgtctgcaccaattataaatgataatgggaaatggtattcatatgaagattatataaaggagttgaattaatatgaatagaaacaacaattataacattatacataaaatagcaaaacactttggttctaaaccaaagtttttgtattataatataaagacaaataaatatgaatggattaatattaatagagaatattgtcatccacaattagtatttattaatggaataccatttactactattattaaatttttaagatttaattttcataatactggttggggagagggattaatttggtgtaaagataaagtaaggaaaaccgtattattatttttgttaaatagagatggtgattatgtcaaagattgggaagttaaaggcaatagattaaaagacttagaacaatttagggaagaagctgttgctttatctaaggaaagatttggtgatataaatgaatgataatgttaagcatatagttagttttagtggtgggaaagatagtacagcaatgcttttaataatgttagaaaagggaatgcagatagatgatataatatttttagatacaacagttgaatttccagagatgtatgagcatattaataaagtagaaaaatatataggtagaactataactaaattgaaaacagaaaacgattttgaatatatgttattacattatgaaaagaaaaaaggtaagaataaaggacaaaaaggatattctttcccagattttagaaatagatggtgtactagatattttaaacaagatgttattaaaagatatttaaaagaaaaatataaagattatgaaataatagaatatcatggaatagctgttgatgaaacaaaaagattagaaaagaataaaaataaaaatataaaatatccacttgtggattggaatatgacagaacaggattgtttaaattattgttattcaaaaggttttgattggaatggattatataaaaaatttagtagattatcttgttggtgttgtcctttacaaaggattggagaattaaaaatcttatataataattatccagatttatggaataaattacaatattggcaagataatacatatagaaaatttagagcagattataatattaatgatttaactaagaggtttaaaaatgacaacattagttcttaattgttgggtaacaaatatctacttaaaaatagtagatatattacataaatataaaaataaatttagaggtgaaagatttgataaaacaaataattaaaagagatggaagtttacaggattttgattttaaaaagatagttgatgtagtagatagagttcataaagaattttcatttgatccaagttttttatctaagaaacatgatgtaataaattatatcaaagataaattagataataaaattaaaacagtagaacaaatacaagatttagtttttgaagcattttgtatgaatggattaatatatccagctaaggctttccaagaatatagaaccagaagaatggtattaagagaacaagagttagaaaaaatttatgcagatatggacagaatacttaaaagtggtagcgatgaaaactcaaataaagatagtaaattattaaatgttaaaagagatttattagcaggagaattttatagaaatagattattacaaattcttcctaaacacatagcagaagcacatagtaaaaaagtattgcactggcatgacgcagattttgatccaagaagcacaaattgttgcatccctaatgtcaaagatatgttagagaatggatttaaaaattcaaatgcttatataggtactcctaattcagttcaagttgctagtacagtattaatgcaaatagtatttagtgtatctaattcgcaatatggtggcacaagtatagctgactttaatgaattattagctgtatatgctaagaagaattttaggaaaaattttattgatgcaatagagttttataatgtattggaaaaggactatgaaacactagaagaagctgttgcggaattagaaaaattatgtggtgaaattagtagtgataataaaaagttagaaaaaggaaatccagatgtatttgcttgggtaaaaaagaaaactgataaagatatttatgatgcatgccaaacatttgaatatcaaactaattccttaactaatagtaatcaaacaccttttgtaactataactatgacaattcccacatcttgggaaagcgaaagagttatattaaattattttaaagttagacagggtggattaactgataataaaggacatagaacaatagctatatttccaaaaatatctatgtttgttgttgatggacaaaatttaaaagaaggagataaatattatcatatattgaaagaagcatctaaatgtatagcaaatacatattatccagatttattactttattcaaaagaagattacgaaaatggaacaatgtatgcaagaatgggttaataagatagctcaacgatggtgaacctatatcaaaagggtgtctattatatataataggctaacggtctaccccatagtaatatgtttaaatatagcgatatatttgggtggtaagtaaggctaagtcctatattattgggatatgctaataccgtgctaagatttatattcaacttcatttatggagagtgatagaatgaaaattcataaagattataatattggagttacagaacaaggagatattataaatttaaaaacaaataaaccatattctaaatgggttgataatgtaggatattatcaagttgtatttagagttaatgggaaaaagaaatatattagaatacatagattggttgcagaaatgtttatagaaaatccaaatggatataaccaaattaatcatattgatggaaataaattaaataataatatagataatttagagtggacaacaaattctaagaatactcaacacggatatgataataatatgtataaaaataaatatagatgtgaaataaaagctacaaataaaataacaaaagaaatattattttttaaaagtattagagaatgtagtgaagtattaaatttaaatagaaaaacaattacatctatattaaaaggaattaagaaaacgaataattatgaatatgaatttgaatataaataaagtgtaacgactaatggatgtatgtagagaagtccaagtacaatggagattgataccattggaagtgccatcgccactcttgtagtggaagagatagtctggctctcaataatataatatattataaataggaaactatttagagagttgtgtagaagcagagtaaatcatgaatataaagaaaatggaaattatgcaaaatatggtagagctaactttggtgtaataacattaaatcttccacatctatgtttagaaacattgaaagaaaatggagatatagaaacattattatttaaaattaataatgcaagtaatacattaatgaaagatgcttttcaatttagatttaatcaagtaaaaacattgaaaccaaaagaagttccaatattatttatggctggtggattagctagattaaatgaaaatgataatattgaaccattattaagaagtgataaatttagtttatcatatggatatttaggaatagatgattgtgtaagattattgacaaataatcaagaaaatatatcaacagataaaggatatgagttgggaatgcaaataatgaaatgtcttgttgataatgttgataaattaaagaaagagatgaacttgccaattagcctatattctagtccaagcgaagcgagtatagggacattatttgaaaaagataaagaacagtttggagatataatgccagaatggttattaaagagagagtattatacaaatagttttcacttttcaagtgaattaccaatagatccatttgataaaattcaaattgaaagtaaatttactcaattagcaaatggtggaaatattagttatgttgagaatggtgggaaagtatataatacaaaagccataattgaattaatacaacatgcttataaatgtggaactcaatattttgctattaacacaataagtgatgtatgttttaaatgtgggtatactggtgaaatgaattatgatgtaaataaacatcaatatacttgtccaaattgtggtaatacagatggaactcaaatgaaagttcaaagaagaagttgtggcttaaataaataggtcattcattatggtaacatagtgtctaaaaggattaaaatgctggaaactcttaaagccttatagccaataaatattggagcgtgagcagaaataaatataaggatgtgaattggagatgaaataaaagggtttaacaaaccttctctcaacacaatataatagataatcagcagccaagtcttgataaaagaaaggttcagagcgtataatatcctatgccttgaattaaggtataatgtgtacgccactccgtatctattcaatagatagttaaagtacagagaaatctgcggtataaaggatatttctaattacaatgtaacaaaagcagttaaaggaagaatgaaagaaataacaaatagatttgttcatacaaatttaatgaagaaagagagtgaataaattgaagaaaaaatgtaaggtatccattgatttggatagggataagtttattaagtattatgaagatggtgcaactattaatgatttacaaatgatatttggttgcaccaaatatattgttaataaacatattaaaaaatttaatttaagaagacacaataatcaatctagtaaaatggaaaatttaatttatccaagcaatgcagagaaagcatatttacttggatatttaatacacaaaatcaaaccattatatcaaaatgaaatatttggatataggattgtgtggaatgaaaacgaagaagatattatgtctatgatatttaatgtatatggaattacatcaaacatatactttgataaaattagaaatgaatattttaaaatattatatgatataagattttttaatcaattatattatgctggatttagatttaattatggatttataaataacccaattaaaagtagttattataaccttgattttattagaggatatattgatggtggatttggagtcattagttcagactctaaatttccatatattcaaattaaaggtggatataattttttaagatatgtgcttggtatatgtaaaatatatggagtaaaaacttttaaaagaaataaaaaagattatttccaatatattagatttacaggacaaaaactttgtgaatttttatcaaaaatatattatgatggatgcttatgtaatccagataatttagttaaagtaaataagatatatagaaaattaaaatataaaaagagatgataatatgagaattgctagtataagtgataatgatagtgtaaattctataacaggatttacattatctatatttacgcagtcatgtccgcatcattgtctgggatgtttttcgccacaaacttggagtgagtgtggtgggaaagaatatcaattagatgagattaaagcattaatattaaattctaaatgtcataatgtttcttggttagggggatgcccttttgctccattaaatagaagcgaagtcataaattgtattcagtggattaagcaaaatacaaataaatttgtttatgtatggactggatatataaaagaagaagttgaaaaatggatagatttagaattaatagatgtattgattgatggaaaatttgaattagataaaaggaacttgaatttattattgagaggtagtagtaatcaaagattgttttataaaggaaaacaagtggtagaaaaagaattattagaaatagttgacaaattataaattatatagtataataaaactaaattcataagctataaaaataaattataaaaggagttgataatgtgataccaaaaagacaaataaaagtttggcattggataaagaaaccatctttatcattttgtggaactattccagttgaagaagatgatggagttggagaatggatttggatagaaccaaatgaggaagaatggacacaatattgtgatgaattattaagtaagtatcggaatatgtctgttacagaaaaatatttttatagacaaagtaatccaataatagatgaattattaaaggatttaaatggaaataaaggagatgattaaatatgaatgaaattatgaatttaggaattgaaaacaaagatgggattttagtagtaagtagtagaattatagctaatggattggggaaataacataataatgttattagagatttagaaaatataattagtagttctgaaaactcagaattgagttctctaataataccaagttattataaggtagatggacaaaataaaaattataaagaatatcttttaacaaaagatggatttttactttatatgttttctattagaggttatgaagaatttaaacttgcttatattagagaatttgatagaataaaagaagaattagaaaaaacacaaattaaacaaataacagaaaaagaaagttatctattaaatatcttaaaagcaaatagcgagttagaaagagctgttgcaattaatgaatatgaagtaggatatataaagccattagagtataaaggagaatatgttgatagtgtactttcatcagaaactttattaactacaactcaaatagcaaaagattttggtttaagtgctataaagttaaataaaatattacatgaacaaggtgtacgatataagcaaagcaaccaatggttattatatgctaaatatttgcaagaaggtttatgtcaatctaatacatacttatgtgaagatggagaagctagatttttaacaaagtggacacaaaaaggtaaaatgtttatttataatttattaaaagaaaaatatggattattgcctgtttctcaatgggaaaaataaagtgttgacaaaataaaaattatatgctataataattaatataaagaacaaatcagcaaatatacccaaacctattttgaaagtgtgtggaaatttgttctttgaatataaaaataaaggatatagaacataacagcaattataaaactttgactgcaaattaaaggtaatatgttctattccttgttaagattataaggagagtgataatatgaattttaaacaaggatttattaatgagggaaataaaacttatactactaatggagcagaagtttataaaagcacaatgagtaatttagtagatttatttggcataataggagatatttataatgataatactcaaaaaatagtatctttatttataaatgctttaaatgaagacaaagaattagctattaaaactttattttattcaagagattgtcgtagtggaatgggtaatagaaaaaatttccttgctattgctaagtatttaatagaaaacaatcaaggagaatatatctataataacttagggtttatatgtgagtttggtagatttaaagatttagttgaacttaatcttagtttaagtgaagacttagcaaaacctataactgagtttatgattgaatatctatttactgaaaaaattaagtatgactcacatgttataaaagaattatctttggcttggaaatggctaccaactattaatagtagaagtaaacatactagacaaaaagcaaagaaattattaagtagatttaataaggttcacaattattttaaaatgtatagttatcaaaaagaaattgctaaatatagaaagatattaaaagtagttgaaagagatatatgtgctaatacatttgaaaatattagttatccagctgttccaagtaaatgtatgaatatgaattatggattattttataaaaaagatacagatagatttaataaatatttacaagaattaaaacaaggtaagacaaaaattaattcatctgtattatttccaagagatatagttcataaatataattattattcaaatattgttgatgatgttttagaagaacaatggaaagcattacctaattattttactaagccaatgaatataattccattggttgatacaagcggaagtatgatagggacacctatggaagtatctatgtcattgggaatatatttagctgaaagaaatcctagtgaagcatttaagaatttaatattagaatttggtaggaatgcacatctatatgatatctcaactaaaccaagactaatagataaattaagaggatttaatggagattgtggtaacacaaatttacaaaaagcatttttaagaatattaaatataggtagagaaaacaaactaaaacaagaagatatgccatctcatttagtgatcatatctgatatgcaatttgatcaagctactacatgtagtgataagtatggtattataaatcatatgagagatcaattcaatcaaaatggatatgaactaccacaaataatttattggaatgtaaataattctgacaatttcccagaaatagcaaaagatggaatttgttatgttagtggttatagtccagcaattatgatggctgtattgaatgcagaaatattaacacctattgaagtgatcaaaaaagctgtattggtagatagatataaaaacatttggtataaaggagagtaattaatatgattaaagaaaaggtattaaaaattgaacatcaatcagtatttgataaatatgctgtgagaataatatatcaaaatgaagaaatattaaaaagaggtgagtttgaagactgtggtattcgcagtctttcatctcccgattattcaaaacaagataatatattttatattttaggacttaatacctgcctagataatgatattttaatagtcaatgatagagaactacaatatatatatgaaaaagtaaatgaagttaatgagaaatatggtattataaaaagatggagagctggtaaaaaagaaagatattattttatagatagagatttttttgttcatgaagatatagaagaaaatacacatgcagataatcaaagatataatattggaaattattttaaaacatatgagaaagcaagaagtgtattagatagtgttcaatggaaaaatttatggaaagatgtaatagaagataaattaaaatttggagtgtgataaaatggattttaaaaatatgtatgaggtatcagattataaaaatattgtatctcatggtatggtttatggattaaataatgctttaagaattagtggatttccaatgagattaactcataatgataatgaagattcaataaaggcatttaatagaggaaaaaaattagggaataaggacagtatatcagcagaagataattatttgtgtggtatagttgtgcaatttgatttatctattccaaataaaatgtggacagaatttcaaagataccattttgcagatataatttcttcacacagtacgatgcatcgtatatctcaaatggatgaaaatagttttgataaaaacacaccaaaagaaataatagatacatttatgtctattagagataattatttaaataataaaacaaaagaaaattatttgcaattattaatggctattccaagtggattgacattaacagctggtgttactacaaattatagacaattaaaaactatgtatattcaaagatataatcatagattgccacaatggagagaattttgtaaatggattttaacattaccttattttaaggaattaactggaattaaagaggagatggttaaagatgataaataaagaacaaatcgtatttcaaagtgaaattgtagtagatgatgaaattaatataggaagaaatttagttgaagcacaagctacaagtaaaaaagattttagagaacttaaaaaggaaatatctgttaattttagtaaggatagattaaaaagagcaatggctagtgctaaattaatgatattaggagcaacaagagatttagttgaaaatcttaaacttagtgaattatctttattaactggaaagaaaatagatgacaatgaagaattaattaatttaagattagagtttatacaacaaagaataacgatagaagaatttaaagaaaaatataaattgatattaggtaaagtacctaaaacagatttagaaaagttcttagcacatcttaaatctatggaagataaagtaatggatattgaatttccagaagaagaaagagaaaatattaaaagtaaaattaatttaatattagggtgcattgagtaatggatcaaatgagaaatcattatagggaatataaattaaaaaggtatggtttaccagacgaatatatagatgtctatatgtatttgataaccaaagataaatcatatcttccacaagattatttggttagctataataagaaaacatcaatggtaaatcttagtaagttaaataaaactaaggaagaattaattttactttttggaagattgttaatatttggtaaattagaggttgataaatgaaaaggaaaaatgttaatatacttgttatagatcaggctactataaatacaagttatgtaatattaaatataagagatggaaaaccctattgggttgagtgttcaaaaatactcttgacaaatccagattatggtgatagaatattagagttatataacaaaatttctgctttaatagtacaacataatatagaagttttggtattagaacaagtaccaccaataataaaaaatttccatacaacaagtgtattacttaaattatttggaatattagaattattggctaagcaacatggaatagagttagtaatgttacatgttatacattggaagacagttgctggtataacagcaaaaggtagagcattgcaaaaaacagaaagtattaaaattgcaatgaaaagatggcaggcgtacaaacaaattattcaagaaagtgatgatgttgcagatgctttgaatatgtcgtatgcgtttttagtagatgaaggttatataacaaacaataataaataaggagaagtgataagatggaaagaaaagtttacgatcaatttactatggtaggtgtgttagattataaagagaaaccagaacttaaagaaattatatctaagacatcaaattggaagggatattcattacaattaagagttaatgttgatggtagtacacaatttttagatttaatgggtggagatatgtatgaagacactggattgacaaagttatctccaatcaaatttaaaaattcagagggagttgaagttaatttaacacctaaacaattagaaaatgaagaactattcaaaacagttcctaattttaaaaagcaaagatttcatgataaggaatttgtttttggtggagaatggattaatgagatttatagtaatttagaaactctaaaaggaaggaaagtttatgttacaggaactttacaattacaatataataaagaaaaagatgttatgtataaaaagtttgttgtaagaaatttatctcttgctacaaatcaagaagatgaagaatattgcaaaggacaattacaaattttctttactaatggagctgttgataaagcatctataacaaaaggaaaagattttgatcctagattaatagaagaattggggaatagagttgaagttaaaggttatatagctcaatataatcaagataaaaatactagaagtacagtggaacaaatattattcccacaaacattttatgtaagaactgataaattggatttaacaaatgatttacataaaaagttattagcatttatacttggtagatttgaatgtccagaaggaaagattgcatctgttggatttgaggttacttttaaaagaggtaatagtgaaattgaattaagcgaagaacaaaagaaggaattattaactaaggaagaaatacaataccttgaattattcccagatcaaaaagatagatttcttagaaataaacttcaaatgacaatggaaagaattgatgaaacttatttaattcaaccacatgcaaatatgcctatacaagaaatccaagaagatatgtttatggatatgcttgaattatataaaacaataggtgcttatgaaggtaaaaaagatggtaaaaaagaaacaaaaacaaataaagtagaagaaaatacaggttcttcaagtgagttaaactttggtgcgttttttagttaattaaaggagtgtgattactaatgggatttttaagtaaaattaaaaagaatgaagttaagtttgggttagaaaactatgtgttcttaattagaggagctgccaaagcaggaaagagtagctttttcgcacagattgtagaagaaatgtatggggatagtacaaaaggattacttatcccctttgaaaaaggttattctgcaatcaatggggtaaatatatttccatatacaatagtaccagaaatggtgatagacgaagaaacttatagaggttgggaagtatttactggtttagtggatgaaatcattaatacaccagaagaagaaagaataaaaatagtagcaatagatactgttgatgaatttattaatgttgctattgaagaaacttgtagacaaagtagagttaaaacaaagaaacattgtgatagtatagactctgcgttttctggatttggcagagggagagcctttatgaagaaaatgattaaagagcaaatagaaaaattaagaggtgctggtgtaggtattttttttataggacacacaaaagttaaaaccctaaaaacaaaaatagatgaagaagaatatcaaatattaggttcaaacttaacagaagattatgatgcagtatttgcaaatgatgcagactttatattaatgattacaaatgataataaagttgttgatggaagaatgataacaggagaaagatatttaagatttagaggagatggattttatgcagctggtagtagatttgctaatgtaccagaacaaataccattagatgctaaggtattcattcaaacattaaaaaattgtgttatgggtttagctaatattaaggatatgaaaactatggataaacttgtagagcaagagcaaaaagaaaataaagctacaagagaaaagaataaaaaagcaagtgaggagaaattgaatgaattattaacaaagataaaacaatttggagcatcagatgatacacctattgcaactaaaacagaattaatgggagttataggagagtatgaaattgatatgaaaaatccattaaataataacatcacttctttacaagaaattattgatagatttggtatttagaatttagaagtggggtaactaatatcccactttcttttattaaaggaaggtagatattatgaataaaagagaattaagtgcatatataaaggattatatttattattatatgcttggttatggtttgaaaagacaagggaaattatatgataacataactaagtttataacagaaataacagaaaatcaacaagattatgattatattcgtttttgttttgagttgacaagagagatattagaaagtgattttatatcaagcaaactttcttcattggttatatttcaaagacaagcatatatatttgttattcttagagataaacttaatacatctatggaattatggactaaggaacaaaataaaaaaaatgaaacaaatgaaatagataataaatataatatattattaagcgatatgttagataaaaataaaagagtggatattagtagatttatttagggggtatagaatggaatttagaaatagagaaatcatagaaaataactttgttttctgtttgtggagtagaccaaaaacatatgggaaatatattaaaagaattaatgccttagataaatttcttgaaaccgaaagtgctaaattcttttatactattggatgtaaattaatagaaaagggaatgacaactttcgatcaagcgactgtattaagttatattgatagtaatgaaattattaaatctaagtttttaggttatggtggatatgaaacattccaaacagtagcaagtaatttagatccaaataatgttgatggattttatggagaaataattaaaatgaatatcatcaatgatttggaattaaaaggatttgacatcaaaggaaattatgcaaagataagtcaaatgtcggcagatgagataagagcatattttagttatcaattaaataatacttttattaaaagtggaagtgaaactagaatagaagacttcactataacagatgaagactttgaattgtttgatagtggaactcaaatgggattaagtattgcatcaacagcacctttattaaactatgaaatattaggattaaatagaggtttgagtttaattgggggacatgtcaatcaagggaaagcccaacctataacaagtaaaatattgacaccagaaggatatgttcaattaaaagatttacatttaggacaaattatattaggttatccaagtaatgatattccatatactagacaaaaggtattgggtatttatccacagggaaagaaaaaaatatataaattaatatttgatgatgggagtacagtggaatgcaatgatgaacatctgtggacattcttagatagaaataataatttagaaacaaagacattgagagagtttatggacttaatggggaaaggaaaaaaattttatatgttgccaagaaaaccatatgaaccaccagaaaatcaaatatatagatgtccatatgatttatatgctattggatatatgtttgggactagatgtaatgtttggagtggatatttagaatttactaatgctaaaacacatagtaagtttatgacatctatggatttaggaattggagtaacaccagaattacataaaacaacaaatgaagaaactgtatggaatgaattatatagagtaaatttttcaaaagaattagttaattgggttaaaggtaatggtggaaataagatatttgcaactaaaacatataaaaatctaagaacaaataaaacatatgtagcttttgatgatcaaatgttatggaatacaactagaaaagatagagaaaaattattattaggttggttagatagtacatctgatgttaatgatttaggagatcattataaagttgttactcaaaatgttccaatgttagatattatggttgatattggtagaagtttaggttggagagttgataggaaagcatataatatagcatattttaaaaatcaattaaaaagaaaaattagattaattaaagttgttgatttagaaaaagaagtagagatggtatgtataaaagtatcaaatgagaatgaattgtatataacagataattttataccaacacataacacatcattttcatttgctgtaataatgaaagcatggcttaatgctgggattaaatcttgtattatctcaaatgagcaaaccattaatgagtttaagcaattaatgatagcacaagtatcttatgagttatttggagatgaaggattagatagaagaagactaaaagttggacattttagtaatagagaagaagcaatgtttagggagataatggaagttataaacacaaaatatgttccatatattaagtttgcaaagatatttaattattctattgaagatgtacaaatgataattgaaacattagccgcacaaggttatggtggatttatatatgatgtatttaaggcagaagatagtgctagtggtagtgtaattggagaaatgaaagagatgtctaaggaattatttatgttggcagatagaacagatagttcaattatagcgacagttcaattaggattgagtgatttaaatactagatttcttgcattagataatatttcaacatcaaaacatattagtgaaccagcaacagaagtattattaattcgtgctatgtgggatgatgaaattactggtggaaagcatgatataaaaatagaaactccaacatttgataatcatggtaatccattaaaagataagcaaggaaaacctataatgaaacaaattagtgttacaggacaagattataaaaagattaaattagtattcttggcaaaaactagaaatacaggacaaggaattgtattagcatataagtttaatggtggatttaatcagtgggaagaattaggatattgttatccaagtcatgaaaatagaggtagaaagtcatgaaatttaagaatatacaatttacagaagatgatatttttaagttattggaagcacttggttttactaatatatcaaatcacgagaaagagtttaagttctcgtggtatgatggtgcttctccaaatggaagttgtttatttaaagatacacttgtttttaagtattggagtaaaggattagatggagatataatagaattagtaaaacataaattgggatgtggatatagagaagcatttaaatttatagaagattttacaaatcaaaaattagtatatcaaagagaaatgacatcatctgtattccaatcttatttagatatgttaaggcaaaataaagacgaggatcattatgaaatatatgatgaaagaattttattggattataagaaaaccatttcacaattatttcttagagatggtgtttctactttaattcaatatagatatggattaatatatgatgaagaaacaagtagaattggaataccaattagggattatgatggtaatttagttggcttattaggtagatttaattataaaaatgtatatggtaatgtaccaaaatatctaccaataattaattataaaagaggtttattcttatttggtttaggtgaaaacaaaaaatatatgaaagataaaatatatattgttgaaagtgaaaaaagtgttcttcaagctaattcaataggatttccaaatgttgtagcattaggaacttgtaatattacaaaacaacaaaaaaaaatatttgagaaagtaaacccaaatgaagtaatattattattagatgaaggattgccaaatgagatgtatgagagaatagcaagaaagttaattagtttaaatcccattattaaatataaaataaaatatattaatgctaatgattgtgatttaggtagaaagaattgtatatttgatgaagatattgataaaattaaatatgttttagaaaataaattaatagagattaaggagtagtgatatagtggatacaatacaaaaggttcaagaattaaaagaacaaggaattgaagtatattcttattccagattatcaagtttatataattgcttatatgaatataaacttggatatatagatcatattaggggtatggataatatatggacaaaacttggaacactaatacatgaatgtgttgagatgatttataatggagagttagatgtcaaggattttgaacaaaagtatttattagggtatcaagaaattataaatcaaggatataaatttccaagtgatgttatagcagaaaatatgcaaagaaatattcaacattatatttatacatttaaaaaagataatgttaaaacagaaaacgaaaagcatttcttggttaatatagctggtatttggatgcaaggatatatagataagataatatttaatgatgatggaacgatagatatacacgattataaaacatcatctaaatttcaatctaaggatttacaggataaaggaagacaattagttttatatgcttatgctttggaacaaatgggatacaaaattaataatatagcttggaatatggttaaatatgtgtggacaagttataaacaaaagaatggatttagtaagccagtgttgacagatagaaaggatatttggaataaacttcaattaaaactattatcatttgctgagttagaggggtattcaaaagatgaagcctatcaattatatttagatttagctagtgattgtagaaaagaattaccagataatttaaaaaaatattttattatagaagaaggtattgttgtttacccttatagtgaagaaaataaaaaagaattaattgaatttatagagaaatcacttaaattattggaagaagaaaaagaatttaaaccaataaagatagataaatcaaatagtttttattgttcttttctatgtggacaaaaaaatagatgtgaggtttataggcaatatgtggagagtttggaaattagtgaagtacctaagatatttagggaagaaaataatataaatggtggtgttgaagttgacttcaaggagttttttaaatgattttatttgaagataaaagaaaaacaaaaataataaatatatttccattaattaaagacagtgcattcaatgaaatacatttagttggagatagcaatggatataatatagcaaatatcttaggttgtagtcctaagatgatttcatatccagatagtaagcaatataaaaaattattattatcattaaaaggaataaagaattggaaagtattaaagagtggaattaaaacatttgataaaatattttccaaaacacaatattcttatttaaagtcatctgtaaatagagatattatattggaacaaaattattataaagtatttattaaaatgatattgatgtctaaaccagaatttattattaataaaaatggaaagataatgtttgagcaagataataaagttaagaatgttgaaatagttagttttttctttgaacaattatacaataatttatttaataacaatgttataatcaaagattatcaatcgtttgaaagatatttattagatattgatgacatattttatgaaaataaattatttatatttactcctaattcatatctaaggggatatatagatggttttaattatgaatatttattatcattgttggataaaatacaaagaaagaatggattttttatattgatagacgatttaatatatgggaaaaagattaatttgatgttagaagctagtgcaaaaatatggaataggaaatcacaagttatagatattccaactgggaaagctatggtgttgacaaatttataatttaatgatataataagatataaatttagaaaggatgtgagtcatatgttattaaaaaaatatgaattaaatggtgaaatattgtgttggagaatgaagttagaatatattaaatatagaaatgatagtgtgtatgatataaacgcaggttatatatcaacaagtgtcaatggaactccatatcgtaagatattaaatattaactggaacaacatacatggtattttggctgcattattaataatctataatgatagatttgattgcgatgtgagaattgaagtaccagataaattaacagattatttagaaaattggttttataatggagatttagattatacaaattggatatacaaaaagaataaagatagaggaactgattataatattagaaaagtagagaaagtattaattgcaagattaagaaatttatatccatatgattattataaaaagtttaaaaatattccagatacagatgatgaagatcaagaatatgatttattttgtgattatgttgatactttatcaagacagctaattaatgaaattgtaaaagatttggttatattacataaagaaaatagattagatgaatttaatccattcaatttatgtgatgaagcgtttaaaatctatgatcataaattagtagataaggataatgatgagttactcaccaaaggaagaattaatttatctagcgtgttagaagaaaatccacttaaaaaagcattagaagaagcagaaatatttattagagaacaaccaagagaatatcaaagatgggtagatagtatagttgcaagagaaaatgcaagaagcccttatgatgaaagaaatattagaactatggaattaacagatgaagatataattagatttgcaaatcttggattatgggagaatgaagatgaataagaaatatatcaattaccattgtcatagttattactctaattctataatagcagatagtcctgtttccccaaaagaatatattaataggattaaggaattaggacattctgtttatgtttcaacagaacatggaattagttttaactgggcagaaaagtatttattatgtaaagaaaataatattaagtttgtttttggtgttgagggatatattttatataatgaaaaagtatatcatattgtatttgtagctaaaaataaaaatggtatggttcaattaaatagattaataagtgatgctgtaattaataattttaaatatagtagaccaagagtaacgcttgaaactattaggcagtttataaatccaagtgatgtaatatgtacatctgcctgtatcggtggttgtcttaaagagccaacattaatattagttaaagaattatataaacactttaaaaataatttctttttagaagttgcatatcataaaagccaaagacaaatagaaataaataaattagcaaagaaaattagtgaacaagttggtataaaattaatagctggtaatgatagtcattatatttatccagaacaaaaagtattaagagatgaattattagctagtagaagaattgtttatgcagatgaagaagatgatgaaacacaattctatatggattatccagactatgaaactatgttcaatagatttaaggaacaagggatatggggagatgatgagatatatgattttattgatagaaccaacattattggagaatttgatgacattacttttaataataactggaaagtgccaacactttattcacatttaagtaagcatgaaagacaacaattacttataaatgaagctaataatagatggagtgaatataaaaaacatattccagaacatcaacataaagaatatattaaagccattagatgggaattagatgagtggcttaaatgtggtatggaagattatttattaacagcaagtaaattagttgaagaaggggtaaaactaggtggagttgtaactatgagcgggagaggatctgctgcatcttatataacaacaacattatttggactttcaacaatagatagaatacaagccaaagtaccattattaccagagagatttatgacagcagatagaattatagctgcacattcaaccccagactatgatataaatgtatataatagagaaaaatttattgaagcacaagataggttattgggagaagaaatgaattatcaattatgtgcatatggtacacttcaacaaaagtctgcatttagaatgttatgtaagacaagagatgatattacagttgatcaacaattatatattacatctaaaatagaagaatatgaaagagattggaagcatggaagtgatgaagatagagaaactatggatatttccaattatattgttgatagagatatgtataagatatatgaacaagcaattaaatttcttggaactataacagatattaaaggaagtccttgtagttggtgtatagcaaacgataatcttatggagatatttggtttatgtcgtgctaaaaatggagatatactattaaatatagaaggaaataagattgaaagttttggatatttaaaaatggattggttaatagttgatgctgttggaattatagatgctgtatataaagaaattggtatacctattccaacatcaaacgaactatattggttaattcaagatgataaagcaacttgggatatatacgcaaagggaataacttgttgtgtaaatcaatgcgaacaacctaaatcaaaacaaaaagttatgaattacaaacctaaatcaatagaagaattatgtgcattcgtagctgcaatcagaccgggtttcatatccaattatgataagtttgagaaaagagaacattttgaatttggagtagaagaattagataagttagttcaaggaaaattccttgatagttcttggcaggtttatcaagaacaaactatgatgatattgaaatattgtggttttgaagcaaaagaaacatatgatatattaaaagctatatctaaaaagaaagaagaaaaaattaaaggtgcaaaagataagttctttgacaaaatgcacactttattaaataaagaaaataaagataaagcagatgaaatcataaataagatatggcaaattattgtagatagttcgcaatatagctttaatgtttcacattcgtacagtatggcacacgatagtgtatggattgcgtatgctaaggcacattatccacaacaaacttatgttggtttaattaaatattttagcaatcttcgtaaacttgataagataagaacacttaaacaagaagcggagaaatattttggaattaaattaatggatagaaaatttggacaagacaatagagttattaatgttcaagataatatcatatatcaatcattagatagtgttaaaggaattaatagtgaaatagcatatttaatttatcctataaaagatatgaaatttaatacatttgatttatatattaaattaaaagaattaggattaaataaaactcatataggaaatcttgctaagataggatattttaaatttaatgataagatgttatggttagtaaataattataaagaatataagcaattaaataaaaacaaagttatagaaatatttgatggtaaagttatggactgtacaatagatttattatatttggagttggttgatgcttgtagtaaagaaacaaattcattattaaagtttgatgatgtaacaactgtaagtagaatactatttaatcatctgtcttggatagatataccagatattcaaaaatattattgggaaatggatttaattggtgaggtaataacaccacatccagagaatacaaagttttatcttgtagaaaaatacaatgagaataaaggaagtatattattatatgacccagaagtgagcagattggaatggtttatgtacaagaaggggttgacaatagcaaataaaaatgttataatggtaggagatgtggaaagaaaagaaaaaggattgcctgtaataaaacaattcatggacttgacttccatatttaaaaatataaaataggagaagtgatagtatgaaaaagtttttagttaagaatgtatttgcaaaagatagtggatatgaagtaattgaagttgcagatgatgcaaaagaaatttacttaggagaagaagttattgttgttgatgggatagatagagaacttgaaccaatagtagtaacccatcaatgtaaatttgaaattggagaaacaagggaagaagcacaagaaactggtatgtttattgaatttccagctgttagagtaatattggaattattaccaaaagacttcaatggaattgatgagaaagagtttatcaatcaacaaatagatgtgcttaatgatgaaataattacatctcaaaatgcaatgagaagtattacagaaagtgcattagatggagtatttggtgctaaggggataacccttaattaagatttagaggtgatggattttatggataagaaatttaaagtagcaatattagtagggcataattcaagtcagcaaggagctttctcaaaagaattgaatatgacagaatggcaatataataaagaagtggctaattatcttcatgaaaaagatggtgaaatgtatgatgtatattttagacaaccacatcaaagttatagaaaacaaatgcaagatgtattagatgtgattaatagaaaatattatgacttggttgttgaattacattttaattcacatagtgatgcacaagcacaaggttcaactggattacattataaagcaaattctaaggttgtagaatatttacatctatttcaagatatgttaaaaagaatttggggagtagtaaaaagaccattaattcctataacaaaagaagatttaaatagagttaatggagcatatggaatacttaaatcaaaagcagattatgtattacttgaaccattctttggaagtaatccagaggaagctagaaaatttagatcatatttacaatatgcagatacattagataaaagtattaaaaaatacttggagagtgttgaagatggaagaacaaaagaataaaacattaaaacaaaatattgaagaaattatacatgtaagaccacaaaatacttatgctgataatagagagaaggaagatttagttaatttcccaaaacattatacaggagatattgaatgtattgatgtgattaagcaacaatttggattagatggaatgattaagttttgtttaggtaatgcaatgaaatatatatttagatgtgaacataaaggtacaactaaaatggatttgcaaaaggcagtgtggtatttaaataaagtaataaacaatatggaataggagatgttagtatgaaaactaaaacattggttgataatattcctacctatgttattcatattaatagttttagtacaagtagagggggacggataatagttcgtatagatgagaataccatcttaaatggaacatatattcgttcctctattaaaaatgtaaaagctattaaatgtgtattagatggagatgaatattatttatttaagaataaaaatattggattatttatgttagagaaagatacaatttatgaaatgaattgtgaatgtgagaagtgggggaatttaattggattatagaattgatactaggttagaaagtagaatagatagagaaagatatattggaaaacaatttatcactaatcaagggtatgattatattgttttgggagtatgggaacattctccaataggtaaagagaaaagatatgtaatagaatttgaagatggagagcaatcgcttgcttattcatcaacaataaagaatggaagtattgggaaatataaaggaatgaaattacaaattaaaagagataaaccaataaagactattttattaatgagtgatttacatttttgctatgaagataaagattgtttagatatattttatcaaattgctagtgatttaagagatgaaatagatgaattggttgatttaggagatggtataaacaataattctttatctaagtttatagatattgaaccaacacaatatactttaatagaagaagttgaagcatataaaaatcatataatgaaaatgaaagaaatcctaaataaagatactaagtttgtggtattgcaagacaatcatttccatttaaggaaagaaagatggttggcagagaacccaatgcttagaggattaatcccagatttatctccattgtttgatattgaagttgaacatggagttccatatatgccattcaatcaaaatagatttggtttaatacatggtatatcatatggtaagttcttcactaaacaacatatagaacaatatggaatagatattatatgtggacatactcatacaatgcaaatgtacacaagtagttctggtagagtaaatgtacatcctattagaagttatggtatcccatgtatgtctaaacatcaaagatatatgcaaggaagaccaactagacaagtttgtgggtttggagtattaacttatgatacaggaacaaacaattataatatagaatatgttatagtagaaaataaaagtgctatatttagaggaaagaagtatgaaagtaattatatagaacaagaggagttgatgaattaatgaagtattatccaatagaagtcaatgaaaaaataggaagtaatcgtataatgaaagatgagttagatggaaagtattatccaacaacaaattactttaaaggaataggatttgatacagaagaagaagcacaaaaatttattgatgaagttttaaaggaaagagattatatagatgaaggagttgttggatatgaaattgaatgctcaaaatagagaatacttaaaagaacaaaaaaaggaattattaataataacagatatagatttagatggaattagtggtgctgtattagcatcactttggtttccattggcaacaatttattctactagaacagatatagttggagaatttatagatagtggaagaatatatgaatttaccgatgtaatgtttattgattgtagtcctaaaacaagagatgaatttaatagcatattagaaatctttggaatagaacatttatttatatttgatcatcatcaatctttatttgatatgttaccaaagaagtatatagataaatttaatattgaattaagatattgtgctacatatatattatataatgctttatatttagataataattattgggatggtagaattgaaggttattgtagattagtagatacttatgatagatggttagataaagataatgaaaatagttttcttgatgctaaaactcttaatatgaagttatcgtatttaggggagcatgtatttaaggcaagattaagaaattatttattaggaagtaaagagttagatgttataccaaataatttaaaagatggatttatatattatatggaaagcatatctaaatatatagaaaagaaatgtaatgaagcctatattataggagatgaagcaataacttttgcagaggaatataagagtgaaatagcaaatcaactattaaatagatataaaggaaagattaaaagaggaatagtagttgatgtatctaagaacagtgtatcaattagaagtaaagatggtagtgcattagataaagctaataaaataagttatctaagtggtggacatgagaatgcttctggtgctagattagatggattaaagaaagagataatagatatgatagctaataaataaataaataatttttattcctaatcctatgttccacaaaggaaaaggaaataagatatataaattaaagtatcccgtaagggatatttttttatttccccacataatgtcccaccttcatcaacatcaaaacaagatagtccataaataggggctttgaataaagtatattcaactattgattttacctagtgttaaggggtaaaagttaggaagtgtagataaataggggagtagagagagcctttaacatatggtaaataggcaagtaggtaatgcttatgatattttaatttgtgc

SEQ ID NO: 5 - DNA, 127766 bp, Artificial sequence
  bacteriophage genomic nucleic acid sequence
ataaccctcttattatacacatataaaatatcctccactattttctcctctttcatatatcttcctctcattttactcatttccatattcccctttcactatttttgtctatatttcctacattttgttcagtttctgtactcttattttcgttatcactcaaatatatgctatctctttcatactctcattctgtataactctcaatagtttcctattactcatattctactctgattgtatggtagctcctaattgtctacaagataaatcggatattcactctttccaatgttcttataaagtacctaagagagttgtagttctctaactttataacctattatagcattaaaaaagaaatatgtcaagttattttttcatattccttttttttattttatttataatatattgtagtgtataaacttctagtttgaccttcaactacaagtcttgtagttatatctactatctctttcatctctttaatatatgcagttatactgtcactatgtatatattctaaataaggatattgtaacgagtcctgttctgatatttttactatctttttattatacaaaaataaatcataagatttaatctcatattccaacatagttacaatacaattttcagtaatattattactaattacatagctatttggatatactgataaataagtatttattgttttttgatgtctttctgcaagaatagacatatcctcattatgaactctatcacttactactaatcttatctttttaatcataattactcctttcttatatatttaataactgatatttacttagagtagatacccaagcataaacataattttctcctatatctacatattctatatctttaataccttttagttctattttttgactaaacttaatttctacacctttctcttggtttatacatcctttatatataataaattctattaatcttttatctgctattctacatatcttcaatatcttatctaacaatttaccttgaatattatatgatatattatttatttgttttatatttgaacttaatctaaatatataattattttctttctcttcttctttgacacccttccaaaattcttttaatttaagtgctatttcttctgcttttttcttatctataaaataattacctaatttgtaagaattattatctatactataaaacatttctgtactcttttttattgttaggtcagaatctatatagtaatattcttgtccttttactctattataatttaattccttattaatttgtttaatcaaatttgttaattcttttaattgtattttattcaataattgactttctaaatatttaatatgagttgttttatctaagatataccaactattattaaaattatatacagcatatttatctgttttaacataatatattatatcttcctcttgttctacactatcaaaatttacttctagtgtaaaagcatattttccattaaataccttttgtgtttgtaatgttatctttttcataaatacctcctactaattatatttattttactcatctgttactgccaaaattaaaattaaaaataatattaaaagtaacattcatttcttcaatctaaatacttttctttctattttattacatatttattctctctttcatataatcttatttgtattttataaccactctcttatactaatatctacacttgcattaggttcatttatcactattaataaattcttattttgaggtgtgtttcctccattatatttacctaatttgaactctaataaaacagtatatattaagttcatagtatttactgttgacatattcttcttaccttctaataatactatatcctcgtcattcatagttattttatacttaagttcattcaatagtatagttttagtatttctctctccttgaatgtctaataataacatataattactattttctactcttactggatttattatttcctcaaaactaaaatcatctataatgtttattatttttatatttctcatatcttaccctctctaatcatttagacctttccactcttttatatcttcctctgtttctaataccttataactggtttctatagtatcccataaccattctttaaataaaacatctagtttattttcatcttctataatttcttttgcttcttcttctgaataaccacaatcattaactaaatctataacttctgctgttgtactgaaagcatttgcattactatttactaaaaatcctactttatatttactcatattatcactctccttatttattaaatagtctactgaataatccaaatatacccagttcttttcttaattcctctttatttacttgtttagcttcttttaattgtatttctgcatatattttattatattcttctttactaatatccactatatcataggcatattctctccaagtacctttcatatatttagtatttaactctaccttaataccaatatttaaacttgtagattgaataattaatttaactttaaaataattactaatataaatgtatcctaagtcataatctgcataatcatttctatttacactatgtaaatcatcaaaatctaatacatttaaagttatgtgttcatctactgtatgctcatactcttgtcttaactcatctaatttcttatacatttcagctttaactttggtaaatattttatttattggtctgttcatagtatcatctccttaccctattgctaatctttcttcctttttcttatctattcttttattccccatcatatttctcatatcttacattgaataactactacatttagttactttctttgtacttccactataataatatttactatgtttactactccaaaagaaacctaaatctttaagtaacttatcattatctctacttgtatctacccatagccaatctcctactacttctaattccatatcctcatagtacattaactcatctattaatgcctttaccatttcagacattctaacatctctatattctttctctacaaagtgtttgataagatattcatactcattatataactctctaaattgttcatctgtacctcctttatcagggtggtatttctttgataattctctaaaatgtttcttaatatctgatattgtttcatattcttttgtaaaatatttgtatttcataatttcactctccttttaatttatttttaaatccctatgattatttctttcttcaggataatctaaaaatacaaatctaaatccagtattcttatcccatacaagaacaaaatcccttccaactatttttaagctaggatttatttcagttgtatgtttataattacactctttagccttttcataaaatgtctttctatttattcctatttcatccaaagttacaaaacaaatatcatctaacatacgattattttcttctaaaatattatctaattcctcatataaatttttcattttatcctctcctttatatttgatatcttattatatcatatctattttattatgccaatacttatttattaattttcctcttatcctactctactcataattataccattggtatctttttgatacctactttctctttatataccaatataaaaatgaagtgattagatagcttttaatgtgtctctaaaatgttagacatataattatatacctcacttgttttaaactcgttaaacaagctctcagcgggtcaaatagaattcagtaaatattagtatttttatactatatgaaaaaaagagatgtatttacatctctcttctctccttatttctttatctttgcttttgtcttgttatatatttctactatcttattctttattggtgttctaaaatatgataatagtaatatgataactaagattaatatgattagtaatctcatattgggtatacctcctttttgtgttgggttattgggggattagttacttctagcttgaacataaataactccgttttgtaaaattattcttctattagaggttgattctgtagtaccattataaagaataaatccttgtcctccgaataattgtaatgcaccaattattttagtattaccatctattacaatgttttctcctctaattttaaaatctccattaactacggtattaccatttaaagttatatctcctgattctaccttatctttaactttattagctgtagtgtcatctgtataattagttgctaattcccaatcagattgattaaaattatctgttttatttctgctagttttacacatatataattgtttgtcattaacccaaaaatcccctttattataaggaggaattggagtacttgtatatatagtagatttattcttagctaaattcctagcaattctgtcttctgctgttgattgtatgggtttccattgagtgccatcccatctccacatagtattgtcgtcagatttataccataaatcccctgtatgtgctttttgcccttgttgtgttgtccaatttgtagcagggtcattaggttgataccaagattgtattttaccgtcagtttgtttacctagtgtttcatctacaagtttctttattccatctattctagcttttacatcttttatagcttcatcttttgctttatcagaggatttttgtataatttcagtcaataaatcattatatttttcatagtaatttacaaatactcttctaaattcgtcagatactacaggagaagtaacattcatatctgctaataaggggttacagaagtctattactttttgttgtaaagtatctaatactaacatcttagggcttaattcaggaaacacatcagctttattttttaaaatagaatgattagcttttaatatttctacttcttttttcaaagattgtttttccataggagtaattttattatctccacctatattttctatattagttatagtatcagatacatatttatttaatgatttagatatgttaatactgtcttgaacataggaattaatattattaaattgactatcccaatttccattatgatagaaatagataatataattattatcagtatctacccataaatccccagtttttgcagtaccttttggataactgtcaacaaaatgaattttattattgttttcaacttctaatattctgttccctattacttcagaatttccattattattcttatatatctttttatctgttacattaataaatatatctttatttctccaaacagtaggtgtagattgccctataaatacatatcttccatttagggtagaaataatataaggctctctaatatcctcccatctattatgtctaaaagatttcctaattaatcctgtattaggattaaaccatatatctccttcttttaattgataattaaaatcagatacaggttcatttacttgatgaaatactttttgtcctgttttagcaaatgtaggtgcagtataaaatgacacccaagtattattctttcttatgtatatattgttgttgtcatctgtgtccacccaaaaatcattatcttgaatacctatgacttgaggttcattagagtatataatcttagaaaactctaagttattctctaaagctttatcccttgcagaaatccagtttgcaccatcataaatgtaaggcttattgccatttgcagtatcataccaaatatctcctttctttaatcttgtagtagaattatttaaaggtttactgctatctctaaatactctattattttgtaaagcattataaaggtcattatcagctgttttattggcttctcccacttggaaattacctctaaaagtagctccgttgaccatatcatagtgaaaatagtttttattatctcctatatgtattcttctaccataaagagtaccatctacatctgtgtgtattgttatggctaagaattttaccttttgaccagctaatatttcattataatttgtagcatacatctgtctttttctaatcatagcacgatattgtaaatctgaatttactaatatcatttctccattaatatctactacaaattctacacctttaccaaataatttatccttatattctgcttgtttagtgccgtcgaaccctttaaaccaaatataaccattattatatttctctactattgcagaaaactctttttcatctatcttagatacccatacttgacctacatcatcatctttagttgagttagattgtccattacctaaattttctgtacctgtatttgagtatttaggtatattcaaaggtttatattctaacacattcttaatatctaatgaataaggtttagtattctttttatttacatttaagcagtctaattctacattattagtatcagaactaattttaacagataacactatccatttataagtatctttatttatattagtaaatatcgggtcatcaatagttataatatctaaaggctctatatgaagtgcattaaataattttaaaggtaatttatatttagtagtttcgttagatgtagcattgtaattatttaatacataacctaacagtttttctatctctgtcttttctaacaatccttgactacctaaatcatattttttctcttcatataaagattttgaactttctcctattttagttctatcactagacactcctacaaaagattgcttatgttgtataataggattacctttaatatataattcttgtagaaatacaacactttcattaggaaacttagtaaacttatatttcttaccatagtttctcttagcaaaaggactatctactaaaatataatgatgtgtttcacttccaactgtttctacatatttacctttaattgtccatctgataccttttaatttattattatattcttctaattcttgttgtgtagggttatcttcaggtttatttactatgagtacatctcctatatgatatagactaatatcagatactcttagaaattgattaccttttctatctatttcttggtctatgaataattgagttttgggtatatttcttgtattcattaatataagagtggcatctatatttttatcactgtttaaattttcttctactgttagttgaatatcagaattatcaaaggtagtgtactctgctacccaaccttcttcaaatttcttttctgtaatatgattagacaacatatatataggtggatatgtagtagaactgtgagattgagaatattccatattatatttaaggttttgattatcccaaactccaaatatcttatttatatcctctactgtaccactataactacctactttaagattactagcactaccaaaagtaatatctattgtttctctatgtataggctctccgtctacttttggtaatatagggtaatctaatgcaaattctctcgattgtccacctatatttctattaaatctaaatatgtcaggtaattcaaaccttacataatataaatccataggtttagatactgtatttaataaattattaatatatttttctttaccttgaacaagcaatctatagtctttatcccaagcaaagaatgttaatttaactttattaggtgcttctttaataataactctaccataaaattcagtataaggattaaaagtgcatttagctagtacataatctcctatggtacaacttgtaaataaatcattattaggtattgttatttctaaaggatagtaagtttgtccactaaaacctaacatttcattagacataaaagcatttggtattttctttttaaaatttacatagcatctatctaggtcatcaaaattatacataggtagattagaatagatatctccttttacggtgttaaatataagtttattatcatcatttaccataatatcacttatattagtactaaaatggtcatctacttgtaaattatctataaaataatcagtaaatatctttatccgttcaaatttatcaaaagtaaatctaatagcactatgtttacaataggcttttaataactcattaacctttttaaaagattttaaagctattctatttactgttatagctttattagggtctactccagtaacataatatacctcattgtcttttaatttaaaaatagttttaaagaactcttttggttgcatattctttaaaacttgaatactagatacatcttgattataccatttatataaataactttttaatgctattgtaattctttttatttctgaagatgttcctgtggaaaaactaatcttttctacaacacttaaatttttaagtatcatatcattattttgtcctttaaagaaatatacaatagttttcttattatgcacttggtattcttgtagagtagataaaggactccatctttgaaaattatctgtgaatactaaacttccattagataaatctactgaaaataaatctgaacttgtattagtagcactgtcagtgaatgagtaagagagtatatctgaaccttgattttcatatgtaagtattgttactaatctacaatgttttcctatcaaagtttcagttgcttgtgtgtgaaattgttgtctaattatatttatatgacaactatctttttgttttccatctattgtatctttagtagtattatctatactaaatatcttaactatttcatctccaactactaaatattgattcttatactgtgttacaggctcttcaagtctagtaggtataactaatgtgtctgtaccaattaaagagtgtataacagtatctaatggctttattttaatatttatattagataatgctataagactatttaaagttatgtcattactttctgctaattttctattcaatcttaacctctttccattaaaactatatctccagtaaaatatgttacctcattattttcaggttcagcaagagtattttgattcaatcttaattcctctccatcaataaataaatcagtaaatattttattggtatttaagtcagtcaatattattccatcattagcataattaaatatgtctactaatgtgttatattgactttctaatatttttgctattgttattgttatatattttctatttgctactttctcgttgattattctacctgttattgtagtagtttttttcgcatttctgtgagtgtatgctatattatgtgtaccttcacaataacagataaattcatcattgagagttttaatctcatacattcttaaacccccaatttatgttaccgtagattcaatctaggtaaagtaaatttcttattttaaaataaactttgtgtttttattccttgtacttgttctttatctaaatatccccactcaattaacttctttattaaccaatttaatcctttttgagatattagaggctgaaaagctaacttatctgtcttttctacatagatttccttaaatttcaaatatcctctatctacatattgttgataaggttgatttcttttatctaaaatatctttatctcttaataaagctaataaaatatttctaccaaatcctaaatcttctaaaagtttagcaactgttttaaaatctatgtattttttattatctgctactttatcatagaatagtgctttttgttcattaggttttacatatttatcataaaatacaccaaagtattctattctttcttgttgattattagaagttactatcttacctattaaagcatctctttgagataattcatattctaactctgcaactctattttccaaagcattgatatatttaatcatagcttttctaacatatttagattctctacttaatatttgttttgcttggtctaaggtaagaacaaacattgttctaatttctccttttttgtccttatacttaacctccaaaattttttggtcgttaatttcttcttcaaattcatcacgaattatggctaataatgtgtcgtgtcttaattctgtatatttaccatttttcttttctacttttccaagagataatcctttttcaagtttataattatactcttgttctctaaatacattaatttccttaactaactctaaactagatatagtttcttttcctttattttgtaatacttttaattttgtgttcattacacaccacttccttttataattttatttagttagtttcctaacttttatttcattatatcataaaagaagtgttttgtcaagtgtaattttaaccataaattccgttattataagtaccactattataaggtctattagttaattgaggtcttgttccaaaatgaatttcatatctaccatcgcattgtatctctacttctactgtatttttttcttttgcatagtcttttttgtaaccactaactactttacaattaggatatatttccatagtttttgtatttggatggctaactataattctaaatactttacctaataaatcattaccaaaatctacaaagttctcccctacaaaataagataaatttagtttagcaatcatattagttcttaatacttcttttcttctttcattgccaaaagtttcattagttatttcctcatcatattttaaactttcataattaatatgttctctaattttattagtagtaaaataactttcatctttaaaagtatcagcattaaaaaattctttaacactcgaatagtgtaactctattggtgtagttattgtttggtctgttttatatactaccatattaatcacattatagactaaatctaatttatttcttaatttttcagataaagttactgtttgtccattcacagacaattcactatctttcactcttaaattgtttatgtataaagcaaataaagaataattattaggtatatctactgtataatttgaatgtagaggttgattatataaagttttagcacctattttatacattaattgtttattccatatcattttataagaagtattactagatatactgtttataagaacatatttatctttatctgttgtgtgcaacaataaataatctgttgttatacctataactccagtaattttaacatctccaacattaattttactcattaaattattattattctcatctttttctaatattccattagaatttatagtaggtgtaatgtgtattttagttaatttataaggctctatatagagagattgtgctgtaagattttcaggtgtacctgttgtatcaatcatatccttgctccttgttataatagggtataaagcctttaaatagccttatacccttaaatattatattaatttctttaaatctattcctttatccgtgttcaaaacttctattgtatcattaatgatagcttgtacaaattgttttacttcagcttgaggtattactacaccagcattcacttgacctgtaatatagaaattattaattacagtttgagatgtacctgtttcatatttaatctcattattattattttgataattaatatctttattaaaattaaacatatctctaattgctgtaagttttcttctttcagtttcaagttgtaatccagtagacattgccatttgagataatttagataattcatttaggttcatattaccccttaaagttttatctaattgttcagatagttcagtaagtttattactcataaatttatctattaatctctttgacatttcttctccaatagtattacctacaagagtacctacttgtgttaaagcactattcatttcagtagattgaataccttgtttaaagttttcaaacattgattgttgtgttttagttagtaaatttaaagatgacatttctgaaaaagacattcctttttctcttgctactttttgtaaaccagctaaagcagaactaaaagtgtctgttttctcttttgcctctctaagtaaatctataacattagagaatggttttctcatttcactagcaatcttatcccaagtcaaatctctaccttgtttttttagattaaataataaatctccaatattcttaaattgtagttctaatctcttagatgaatttgagaatacagtatcaaaataaacttgtgacatattatttaataatgcttgaacataaggtttcatagacccgacaaaagattctccagcagttttaccactatctttccattgagttaagaaatcttttctgacatcagacataatagtaactaatacagacatttgtttagctaattctcttatttgttgtgttataccttctgttattgttactccagcatctttatatatttgagtaagatttttaactaaatcctcttgtttagatacactaaatccttgaaaagcttcaaaagtagttctataagcaaacttatttatcatttcttttaaatttatcatagaagtaacatagttatctactacttttgcatagtctttaaaattattttcaatacctttactatatgtttttaaccatttagaaaaatcttctaattgtttgactgacatatcaagaatactaccattaaaaccatactctttcaataattcttgagtagataattgattatttttcaaccaagttacagtagacttacctgtaaaccaatttcctcttgttttgctttcttgtgttaaataactaacattaccaaaatctctgtttacattaattactccatataatttttctaaaccaccagtaattctagctatattatcaatcgtaggcatattagagaaaatgctaatcatagattgatttaagttaagtaaattagtattaagactttctaatctattagcaactatttgtaattgtctagtgttttcattatattgatttctagctttttcagattttttatctgcttctgcttgtctattcttattctttctgccaaatatacctcctagtaaagataatcctgtacttgtaagcattccagcaggaccaccaaaacctaatagattagaacctaaagcacctaaactaccaaataattgagaagtagaattattaatacctagtgcatttgttaatgcttgtcctacttgagcatctgcattagctctgccaaataagtctttcattttagacataaattgttgtaaagtaggggataagaatttcataccttgttcagacatagaattagcataattacttaatccttcaaataatcccccaaaaccagcaccaaatttacctgttccactatttttcataaaattagccatttgagaaaaacctttttgtgctacatcattcttggcttttattaactctaattcttctcttgttttttgtacttgtttttcttgtaataacttaagtttttctctaactttaagttcagtatctaattttaatattttggtttcaagttctttttgttcttcttgggttaaagtaattccttttgcttgtttatcttgtaattctcttaatctcttttctatttctttggtatcttcaaagtctaatttagcatatatagttaagtcttgtttattaattacatctgaattaataacattgttcactacatcttgcatatcttttgatagtaaagataaattaagatttttaagtttagatttaatatcttctatttttaaaccagtcaattcaatagtatcagctaaagtagaaaaataatcttcatcagatagtttatttaaagaataaagttcctttttatatgaaataagactatctattgcttcatattgcttgtctttaacactttctattgctttctctaatagagataaagaattaatagcaaaattatcaaatttgttcatataagacatataagcatcatatagtttagataactcttgttgttcctctttaataacttgtccattctttccactaagagtatccatagctgttatttcttctattctagctttaattctttccataaaggctttatctgtttcattagaatctttttgaatatacttttgattttctattgataatctttcttttgtagctttaagagtatctaattcaagtttaagtgattgttgtttgttaagatattgttgatattctttttctaatccttctttacctataagataaatagcttgttctagtgctaaacttctttcttggagtttaacatattccatcttatattcagtttctttatgcctttgctttttatgtcctgttttagcattctttttattttctttttcttgtatatataaagcataagcctttttataagtttcttctttatgtctagttttacttaattccttagcgtattttattctattctctacatcttttttttctaatttagataaattatattctgctcttgctctctcttctgtatgaggttgcatagttaagccatatctttctgcttcttgtagagtatcatagtctacttttttgtctacttttttattctttttattagcctttacaaattttaatgcttcatcataaccaatttttccgtgttcttgtatataagcattctctgcttctttatcttttatagttttttctaatatagtttttgttacttgtagatgtatttgatgaaacccaacagcttgttgcaaagcaatgtttatagcttctaattgttgtttagcctcatccaattcatgtgtgtctaaattaaaattatacttttcgttaaagtgttttctaaatatattagcaacttctgtagcatttttgcctacatcataaagtttattagtaattgggtcaaaatatttacctgattttgctaaatcttcatttagtgtatttacaaataattctagtgctttatcactgcctcttaaattatcttgataatctccaatttccttagataaatcttgcattttggtagaagattcttgaagtctttcattcaaactaactaattcctctgaaaatttctttaaatttcctttacccttagtagaaaattctgcaacaattttagtagcagtagttaaatctagtattttaccctcattcaacttagaatatgcttttcctaattcttcaaccatatcctgttcattcttcatataggctctcatatagtctaaggcaatttttgtattttttgaatccacactccaaccataatttatttttgtaacattgcttgtgtcataatactctttctctattttatctaaaatatctaattgtttttctttatattctttgaccttagcttcatattcttttgtattagtttctatatctgttgctaattttattttcattttatattcagtagaattttttaaagcatcttgttgtttatccaataattcttttattttcttttgtaaatcattttctgaaaaagctaaatctacaagagttttaaattcaaaagtatattcagtatttttgtctaaattaattttatccatattggcttttataccagatatggtattattaatagtttcaaaagtttgaatagtttttaaattagattgaataaattcctcttgatttttctttattttataatatataaaagaaatacttgtaattgctatccctacccaagatacccaactagaaataaaagtttttaaactatctcctatgaaatttaaagcatctctccaaccttttatatgtaaatgaaaatagtgatttaattgaccaaaagctatacctgtggttaataaagttttacctaaaaagcctactgttcctcctatgtttgcaaacactcttgcaacatcatctaaataacttgtaggattttcagctactaatttattaaaagcataagcaactcctgttattgcatctcctagataatacataccatctgcacttatgtgttctaagttttgtttaaatagttgtaattgattagtcatagtaaacatttgtgcttcaaaatctgccacataatctttaccttgagtaatattacttactaaattatttatatctccatttacttgacctaataatacttctaaatcaagtgcatgtctttgagtaaacattttttgtaatgtttgacttgttaagacaccctctacctttaacttagacattaattctatagccaaaggtaaatctttctttgctaattgtgaaagtacatcagcatttaatacatttgagtttgtacccaatgctttcatatacttatcgtctaatttataatcttttacatttgtattaaaaagattttttgctgtcttttccattgtaactaaacgagtgaataagacacgaatttttgttccagtttgaccaatagttcttattttttaattaaagttctattttgttcaaggactatatcttcatctcattttataaatgagagcaaggttattcaatttaagggaatttcacccacttaaatattttaatatttaagccttactcctattgctatatttatattgcgtctagcctatgggatagtctctacacctctcttatattaaagagttcggctcggtattaccaatctaacctaataaatatatttaggttcataggttctcttacgaagtgtattcgtttattctgtaaatagaattaaagctaacatcgtttattagcaatcttatctaacttctaccgataacaaaattaatcatacctaaattaatagttttccttgtgattgacacattttacaatgtgaaagagcctagaataaaaatatgtagtatgtttattcaactaactctgacgcagattttccaagattattcattactccaagccctactgctcctacttctagtaactctttcttatatgcttctaaactttctcctgttttattactagataaggcaatcgctcctaaagcaccagccacttggttcattccaccactaatactctccatactagaagctgtttgtattgctgttgagtgtagaatatttaatactttttctgtattttctgaattaatacctagtgataccattaccttagtaactgttttagctgtatgttctaaatcttccccagttgcaacagctaattttgctgtttctttggtaatttccatagcttctttataacttcttcctgttcttaccaaagcatcagctgtctttactaattcctcagctgttttaggtatttgagaagatagatttaagaattcgtgcatactatccccaaaataacttataccttttcctgctgctatgtttaaatttgtaacactagcttctaatttagtaaacatatctactttactaaataaacttaataaagattgataactataacctaaggcttcaatacttattcttaattgaataaatttagttaacacatcatctgttggaggtttaattccaccttttgaagcattctttaaattatagtactctctggataaagttgctactgcttttgttaaactaattatcttagtttcagaagtagatgtattaacaaaattcaagccatctttattaattttacttacttcttcttgaatagcttttaagcctgacaaaacaattttaagtccattcttaaccttatcagtctttaattctaattcaataaaggtctgtctacctgccattttacctccttatttattttcttttcgtagattttcatattgtaatttttctacttcatatttcctagataaataagctcttttagtttctatttctctaaaactaaactcactcatacatttacccatattttctttaaatatcacattattaccaaattcagcacaaacttgaatagacataaaggcttcagataaatgttctgtcttttttccattttccatttcgctatgtagtatatttagaaattctttaattaacttattctgttcatctaatatatactctctgatgtcatacaattctatttcagttaattctaatttagtaataagtttacctaactcatatatatcttttactctatatttgtcatatattaagttatcttgtataaattctatgtcttttaattcctctacatctgatttatctataaggaataaatctatgtctataaaggttataatatcatctataatgtttttaagttttttatactctaatagttgtttatactctctacttaattgtgtttcatttacagatttatctttaatatcctttatatgaaataaaaagggaagagttatatccccatttagtttaaactctcccctccttataatttctaatttgttgaatatactcattttgttttagcctttgtagtaaccttttttgaggttttattttcttctttgactaatttatcctcttttgtttcagaactctttaaatcagcctctaaggcttttatttctttttgtcttttctctaaatctttttgtagattaagtaaagtttcttctctcttttcttttggtaaattatccatcatagaccaaaatttaaaagtttccatttctcttgttaaatcttttatatctgtaattttagcttttaacaatgcaaccagtttaactaataaatctatcatttcaggttgagataatacatcacaaaatatatttaaagcaccttgataatctccttgttctaaacctaagtcttgccataaagagatttctttgccctcttcatctttaaagacacaatcaaaatctatatgtaaaatacagtctaatagttttgtttctaattctctctttttaaatttatctctattcttagtatcatctataaccattattaaagctgtatcataagctaagtcaggtctttcttctctatatactcttttagtttcttctgacaataatctgaaaggtatagttttaatacaatctttcatttctatgtcaggtaatttaataccagcttttaaacttaagacttcattgaaaggttttatcttaaaaggtaattctactccttttaaattctcgtgtataactcctaaatctactactagtgttttattattactttctcttatttcttttagtctttttgctaatttcattgattttctcctttttataaaaaatataggataggataattacataccctatccttaaataaatgttattatactaaatctactgtttgataaatattcatatcttccatatttctatcatatacaaatactttacaaacatattgtttatttccactacctaaagcaaagtttactgccttacctgttaatcctgttccatctgtagtatctacaacaacaataccattttggtcagtaaaagttgttccagataaagatattctttttgctttaattcttgtattaggtttaaatttaccttttaatactggtgttccaccattatctaatgtaatatcccctgatgtagaaattttacacaaaactggtttagttattccaggaatagtagaagctgttgaattactagtcacaataccgtctacaactatttcatctaatacttcatctttatctaatttagatgtttcccctacttcaattaaatagtcgtttctttcccacacgtctgataatctgtttccgttaaatgtataagtatttacatctccttcatcttttgtcataccagtgtttgctactagaggcattatcataacaaaagttttatttgatactactctaaattccatacatatagttttattaaatgtatcataagcatttctaaatgtattttttcttgttgctattttacctgtttcagggtcaacagctccagttactttaatttcatctgcttctaatccaaatactttcttaaaaggtaatcctatttcattaggttttgctcttgctgttaaagttttcatagtaccattagtacctactattgtaataatttcatctgcacctacataaaagctttctcctttaaggacagcattgagtacagaacgagaaactccaaaaggtgcattatttcttacaaagttcaaatcttctttgaattgcatagaaatttcagcttgtgggtcttcctcatccaagatagtaggagcaacattcgtaccattactagcttttacagagttaataccatagtttccagattgtaaattatcagttgataatccagtaactggttctttcattgttaaaagtatagaatatattgaaacagcttttgttttatttgaatatcctaatgcagagataagcacttcggtacttgttctaccgacagtttgttctcctccaatatctataactgttctagccaattattaatcctcctaatttatatattgttaaatgtctttattataatataaaatgttctataaacattatctctattctctacaaataaagaagaggtaacattattactaataaaaacatatttatttctaattaatttattattttctttatcatatacttgtaatgtgtttctttttctatataaaaataattctacataactttgaatttcattatatagtttaccttgttcatctgacttaaaagctacaccaaaatctattctcttgaatgtattgaaggtattgcctgattgttctcttgaataagaataatttgcttttactaatattggttgtttttgttctagtgtaaaacttcttttaggtaatttatttgtcgtatctaatcgtagaactattttattagaaattactacattaagtatattaataagtttatttccatacttgaatgttttatttaaaaacatatctgttgttgcttttatattattatctatttcaactattatttcgtcattgttttgttctataatcttaaactttataggttcttgaattagtacatcatctgtgaaataataaggtaaattatcttttattacttgtttattcaaatgatacaaaagtgtatttatttctatcatactaccacactacttctagttattttattattttctataaaagacactatcttgtctaccaaactatctataacatcttccatatctttatctgctgtactctctaataaatctgtaacatagtctactataaaaggttgtaacttagggtcaaatcctcttgggtgttttgttgatggcatattaggattagtatttaacatatcaaaggcttctgaatttacatttaattgatattttcctttagatttagaaaatgaaattgtatctcctttttgcattctcttttgtaaatctttccagtggtcataagggtctatatagagtttagcagataatttattatacccttcttggtctaatatacctctaaataaatctcttgtatacctagtatcataagctgttgcttctgctattttataaatataaatagctacaatatcattttgatatgtttctaaatctttatcaaaattaatcatttttgtgttcaattcatttataaattgacgcaattcaactttagtcttagacatctactaacctaccatatatctctcttgaaatgtcatatgagccattaggagctactttatacacagtataaacattacccttataatttatcttatagtttgtaaaatcgtttataggacactgtgatgagctctcatcaagtaaattcttagcttgtttaagttcagatactagaatatgaaaagataactctaatttatgattattattactttcttctacatattgttcttttgatttagccacagtacattgtatttcatattcctctaagccattattagattgaatataacaataatcgttaaatagattttttagctttttaatatgtttttccaaagtttctcttataggtttcatattaccagtccctatctatatataatagtcctgcgtttctttctaatttattatttccgtttgggtctttttcatattgtaaagctaattcatattgtcttaaatactctgctacaagttgtctttttgcttttagtatttctattgggttattataatttattatatctgtatcatttgtaatagatttaacttctaattcatctgcatagttaattaaatcttgtaatgctttttcatacaaggctttccattcagcacttgttttagtgtaaatatatgttgttaatgtggctctcatttaaccacctctttatttcttcttagtagtaggtttatcttccttttcttctacttcttctttaatttctacatttttatctaaatctattaatatttttataatatctacttgtctacctctaaaatttatatggtcatattcttcttgcttacagatttcttttgcaacttctttatattcattaaatttagataataatagttcttttttattttctgtcaatgttattctcctctaattattaaaataggtaggtagttatatctacctaccttaaaagtaatttattatcctgctatattttcataagtcatatctatctttttaattaaattttctaatttagtggcttcagtatcttccatccaacctaatttatttgcgggtgttgttttaccttttgctattgataatataactcctgattctcttgctaatacaagatattccatagggtgtattcttaatttcattccatttacatctgctgggcttgtaatagctttcaaatctttttcagtaactaatgataaccctctttgattagtagctttatttacacattgtaaaatcatatctcttctaccactatctaagaaaattataaaatcatctgacatatttgctatttctataaatttaacaccagcaacattcattacaggtacattatccatttgatggtcgtctttatatttaggataattatataaatcagctaatctatatattgttctaccagaagccaatgctataatgtcatctccactataagtgttatatgcttttattaaatcagcacaatctaatatatcattgattgttaaagcacctgatttagttcctctgtaatgagaagtattaccccatttttctttttctaatggattaagaactattgaattatcttcccctcttaaaaatccaaaattagaactatattgttctgctcctgtaccttctgctggtattttaccataatcagagtgtccagtatacaatgcttttataagtttacctggtttaaatctttttaaataaacttgtgagtaaccttgtactgttttagcatcttgttctaataagtttattccattattttctgcgtccataatgtcttctacttcgtgtttaaatacagtagcattataaccttcagaagtctttaatttgaattcttgtaattttctaccaaattcaggcacatctgttgagtatgttcccttagtgaaaaacatattgtgatgttccacaggtattctagcaccttcaattctaattacttctttaatattacttgaaagtatatttacaataggtttttgtaattctggtgcttttgagtttccagttattaagtgcattacgattgcttcaacatctttattccctgaataaagttcttttggcaaatcatatatgctatttcctgctataagtaacaatttatttatcctcctatattatgcttcaaatccatttaagaatactcttactgcaactctattaacattatcaactaatactcctactatttgttccttagtagttcccttagttaatgatatttttccatcttttcctagatatacatattgtccaatagtacctgaacctctagctatatcatataatttagttggattttctaaaattgcaaagttttctactgctaaatatctatcattagctcttttatctgttttaggttctattgtgtaggcttctccccattcaggaaaatctcctttagtagctatacccacagccattttagatttagattcatctgctaatattaacttaccatctgtatcaacagcaactaaagctcctataaaaatgtctgttttaacaggtaaagataaacaaggttgtgccatagcattaagacctgtacttcttatattatttttatctgccaacttaatgtcctcctatttattaataaccattagccttagcccaattagtgattacttgtgcctctttttgtctttcttctaaatctaattcttcttttgtcttgtgttcagtatttagatttatgtttttgttatcaaatatacttgtagatttctttttatttgcactttcatatcttttcttttcttcttcttcatctataattttagataaagtttctttgtatatttcaaactcttgtaaggctttttctgtatcctcattgtctaaaactaatttcaatttattataataaccttgtaaataaggtttttcttttatttctttctctatatctaatttcaattttgctactttatttactctcttagtagcttctaactcttgttttattcctttaacttcctcttcaaaagtagatttaataccttctaaatcttttttcttttgttcttcaagttctattttagccttcaatatttcttgttcagctttatctttaccaagagtttctattgtttcttttaatttactttctttttctttaagtaaatcttcagctatctttgtcttagcttttgtattttctaattccttagatttaagttcattttcggtttttaatttatctaattcagcttttagtttattaagctcttctagtagattaggttcagttttaggttcttcttcctttttaccttcatcttttttaggttcaggttcattgttagaaatctttaaaaacttttcttcatcttcgcttagcttttctcctttggcttgtttagataagatttcttctagtgtcaagatatcctcctatttttctaaaattaattttctctttatttagacatattttgctatgtctaccatttatataacttattctgttttaatgtcaattttttattgttttatttcactaccattttttaactgattagcttttactatttgtacatcactatttccaagcattaattcatcatttatttcttgtgttaattgtttaatttcttcctcacttctaccttgttctctccataattgttgtagtgatatttctccactctttaacattaatgaattagttaatgctctatcataagcactatctctaagaatagcagtaggcattttaaaagataaatcaacatctgtttcttcattatacatattatttagttttaggatactttcaaaaaaaggcttaaagccattaattatattttgaacatatatccatattttctgttccattctacgattaatttgttgatataccttagaactatctgaacttgctaaatgactatttaaactaggaggagttaatcctgccttttcgtgtaaactatcatatacatcatttctttcattaaacatacttctaaggtcgtttgatatttgaatgtctttgacttgtgcttgattaggtttgcttgtatttaatcctgtattaaaagcattttgcttttctgtatcagaagtatcctctctatctgatttaatctctgcatatccacctatattcatactacccgaggttaaagtaccatctataacatatatcttaggaaaacctataattctgttagaacctcttatatcactttctatctggtctagtcttaaactatcatctatatatttgtcagcaggtattctactaaagggacaattagcaatatcattagatttaatatgtataatagagaataaatcactaagtatttcagggtactcagtcttacctaatatacttattcctccttttttatctttaactaaagcagtaccactttttttacccccatcagtagaaagcattgttacctgtcctctttcaaatactattattacatcttgttgattatcctctacaactcttttacttgaaaaatcaaaatatttatcatatttagtagtttgccatacatatgttgtaggtttaccaaatttatctaatataatatctgatatttcttctgtaggaataacagtaacacaaggtacataagcctttactttacttttactatcttctatctcttgaaaataatagtataaaaaacaatctcctttgctttccaatatatcataaattgtagtattaagtgaagtccaattaatactctttaatataggttttaatatcgctaatttattactatctatttgtgcatctaactctaatataggacaaaatgcaaccaacttagagatgacttcttcaatagcatcctttgtaacatacaatcttttcttattatcatctgaaatactatcataatttctttgtttattagggtcaaagaatttatttttgaagtggtcataggatttaccatttctcatttctttaataatttttattacatctcgtctatcttcccacaaatttgggtcatatggtctatatatagacatctacacacctcacaatacaggacaccaagtgtccatatttattttctttatattattaatctctttcattaagtcctcttttgttgctactaatttttgtttatttctatcttcaaactttcttaaaaataggaaaaatctatttctgccatcatcataaatttttttccttttatctacagcatttactctctcaataagttcttttaaaccaatattaaacaatgctaaactattcaaatggtcatcagaaaactcttctcctcttggtgctgaatagtttaaaacatagttattagttttacctgctttcttttcaaaggataacatttcataatataacttttctgcctcccaactagcttgtttatttaataatttcaacttaccttcatataattgactttctaagtactgaaacattctactttttaatagattattatatataataggcatcaaagatattactacattatattgattgcaatactttatgaattgttgagcaagagcatacccaatcgcagtacaatcaaagcaaaatacatccactttatattctatgcacttttgaacacatttctctgccacttcatcaacagataatctttgtgtttcattttggttaaaggtaaacatattgtaaacagtgctataaaagttggtttcgtcaatagtagtcttacctataactaaacttttataatcgtgtttgattgaagtatcataccctgcaactataaaactactcatatcgtctacatcacttactacactattacctagtattataggctctgtcatacaaccaatagcttctaatatttcttctgtcataaatctaccagttaaaatattaggattaagatagtagttaaattgaatataaggggaattttgacctctttctttaatatctccctcaacctttttcttatagtaaagtgccatattaatatctgttaatgctcttaatctgtaaatttcctcccattttctaacaaatttaattacaccactactattatactttgctacaaatacacttaaactatcttggttaggtactccaaatataaattgacaacctccagtggcagtaagaaatggagatacagatgtttcaaataattcagtatttattaatccagcttcgtctattacaagtgcgtgtgctgaaagtccatcttgtgttgtacctacagatatagctctcatttgactataaggtatacttttcttttgtcctacaaatactttatttatttctaagtttgaaatttcatctataagtttgctatcatcttttttatatattaatttatcctcataattttcattatgaaattctattgctttataaatataaggttttacttctttacttaatttttcaacagcatcatttttatatgaacctaaaactagataaaatctttccaaaggtacatccatatatttaggtatatatacaacagcaaaaccactaaatatctttattaattccgatttacctgcttgtctactccaagccattaaaaacttctcggaatttctttcaatagtagcttttatcattacatataattcactccattgatatacaaataaaggtatagagttcatttgtcctgtcctcttatcaggtcgtctacgaacatacataacatagttaaataaatctctatataaaggattatctaagaataatttaccctcttcggtttctttatcatactcatacatgaagggaatatatgtatcttcatctttaatatacataaataatagtttagagtattcgtctaaataaaaagcaggtttagataattttttaaccattaattaacaaacctctcaatatctatatcctctatatctttaagaatatcgtcctcactagcattaagtttaactttttctctactagctttcatgtattcttgagttttgttgtcagctctatctttctctacattgacaggagatacatcatctaaattcttagcaactttttccatactgtcaagaatagccctaatatccttacccacagcgtgtgcttcttgaaggtctccgcaatactcctgatatttcttggctctatctagttgtgtttgtagttcttccagtagtgcatacctatattccttactattcattttaatattttcaagccatatagctttcttttcttgatagtattgttttaaattaggaggcaattcacttgctaaaaatgtttctatttcttctaactctatatctatacctaaaatatctagtttataatgtatatcaacaggagataatcttttggctctcatatttaatattttctttaatacttcttcatcttgtgtattaacaaatgtatctgtttttaattcatcaatagtcttagttagcatattttcttttctaatccattctcttgtctttttggttaaatcttcttctaactcttgtctttttgccttttcttcttgccacttagaatatagttgctctttattaaacttatctaatatagcactattgactacaactttttcttttgccacttattattcctcctttttctttcttttctttgattttttctctgcactctttttatatatttcttttatcttttgatatgtagttatatccttttgtgcttttgctaactcttgcacagggtctaatcccatatcctcccatagttcaaatgctaattttctcaatctctctaatgaataatttataaagtgttttggaaatgaacactctctaattaatttttctttttctaattcaggtgtatatattattgtatcttttaatatacctttttttaatttctttggtttcttatttctaattttagaaatagtccactcttcataatctatagtaattctttttgtaacatctctatgatacttgtatatatcataatcttttaaatttaatatctttttccaataagccatagtacccatagatacaggggttttaaatttagttctactatctattttatacaaacctgtatcttccataaattcctgtgtacatactaattttctttctggtattttattattatcctcatctaaataatggtctaataaatattgtctaaactgttcgtgtgtcatctttaatttattaggtctattatctataaacatctcatcaactcctcttaaataaaaaggtagtaagtcttaacctactacctatctaaaagagaaaatcagagaaaaatagcatatttgacttttaacaaaaagtgtgctatacttaaatcaaaagatatagaactatatagaagtagcctatatctaaacatatatataacaagattatattttatgtcaattttaattaaagagagggttatatggaacaaaaagaatttaatgcaaaaacagatttatacccctacacacacgagtattattttggtttctttaaaactaaacaaatgatagattttataaaaaatatgaataaaatcaatcctaatatagatgatgaatactttagtttaaaactttatttaacttgtttaaaacataatttaaagccaaacaaacaatcagcctactatttacttcaacttgaatggagaaagctaaaaaagtaccctacaagccttaaaaatgtaaacctaaaagaactcaaagatgaaacagtattagataacaataacctagaagaaaaatgtattaaagatataaatacacataaattatatgaaaaaataatgaattatgtagaaaagaactgtaaagaaagacaaaaacaggtatttaaactttatttctttgagggtcttagaatggttgatattcaaaaaagaatgaattttaatagtagacaggcagtagatactactttaactaaacttataaataaaataaaaaataaattcggtgtagagtataagaaattaaaattagatgattaaaaaaagagatagataattctatctctttttacttttattcttttatatagcctttcttaactaacaaatcatatacaaactttctacctttctgtgtccaaacagtagtatttatttctatatctccttttgtatgtgttctaacatctgtatatcctaatgcttgatattcagcataaagtacccatattttacctactttatattgtactctttctttttgtaatatagaatttaatttaacagcactcattcctaaatccttagccataactgtaactgtcatagttcctgtactatttaaaactttatcataataattagctttaggtttcatttctttattttctagttttaaaggttctacacactctctttgatattcattcatagcatataaagattcctcttgtgtttttgcatttattatttttagttttaaataattttctttgcttatttgttcttctagttgttttattctattttgtaattcttttaatttttgtataacagctcttctaacaaatttactttcacgagaaagtagttgcattgcctattctaaatctaataagtacataggtctactttctccctttttatctttatattcaacgagggatatttttccctcgttgatttctatatcaaattcatcatttataacttttaataagtctttatgtactaattcaacataatgtcctcttcttatttctgcttctgtcaaagttttattttgtttcttaaagtcatattctctttgtctaaaaatattaatcaattctaataattctaaacttgtaatagttttatcttctttattctctaatttttctaaatagttcattttatatactctccttttctaatatttcataataatgtatattcaaataatactcattcttctcattcaataaaattattcctgcaactttaatctcttttcctagttgtatttcatcaaataactttttacaatcaggggaaggtttaccaattctaattaattttttaatattattattctctaatataatatatttatcctcatcttttatctctaaattaattacttttcctgttatccattcagtagttttatataaattatctttacaaataacagaaatatcattcttaaatattattgtcataattctactcctcaaacaaatatttaggtggtgtccaattattaataaactctacacactcatcaaaatcttttagctttaaatctctataacttgctacttgaaatttatctttaatccctttgtataaagccatataccaacttcttttacttttagaacttgctaaaataaaatcatagtatttaatttctactttacaatttattttcttttgtatagctctttgttgactataatctattcttatttgattttctaatttattttcaatttcttttatttgtgtttgtaaagaatcatttaatttattaatttcttttttagcatattctttatattctatctcataatttcctttaataaattcttccattctattgtactcattaatgtaggctattttaaattctaaatatccttgaatgttaaacatataaagaataaatccatcttttgttaataaatattcttttcttaactctccctttttatccttgtaataattaaaaataattaacgaactcacatttgagttggttgaatcattaattatattttctaaatctctaataatattgctatgccttttacctaacttttcagcaataactctactactcactactaattttccgttttcttctttgattgttcctacaatgtctaaatatttatctgtcacagtttcctcctatattttatattaattttgtgaaagccaaacttttggctctcatgttattatatagaaaattcatatttgaattccctattattttcctaattttcttctgtatatacttctaaaatttgcctaattacatctgacttgcatatattattaggtatataattataccaaaaactttttaaaatgattttaaagggtatcacagagcctcaaatattcttttctacttccttaattctttccacagttatgtcataatatttttcttctagttctattcctataccatttctattagtgtttttacaagccactaaggtactaccactccccatagtaaaatctaaaactaattcattttcgttagtataggttttaattaaatattccaataattctacactcttttgggtaggatgtaccattttgcttgggtgtagtttttgaaaagtcagtatacttctagggtacttcatatctcctaactcctctgaattgtctactttttcaaatttaccatagttattatttgtcattttggtagttgtaccttttgagtgatttttgttacctttaaacttttgtggattgtatgtaggtaacttcttataaaatactaatatatcctcgtgagatactaaaggacatctatttgcatttaaaaaaccaccaggcaatactttatctcatattagactatatttatacatcttttcattactcattattaattttgcactaaatgaagattgtccaaaaaatataatgcaaccattttcttttataattctatttactttattccacatttcttcaaaaggtaatgcaatatcccacttattttgtgttctttgataaggtaaatctgtcaatatcatatctactttaacactattttctattaatttatctagtatattaaaacaatctacattataaagtctaatactcttgtcttcattgaaataatatttcataaatcatctccttattaataaagagtagatttctctactcttattcaaaatattctaaatttatgtgttccattgaataaaaattatttttataggtttctaaatatactgaattatattttaaagagttacaatctttacataaactatttatttcctcatctctattaaatatatttaaaggttttccacagcaatcacaataattacctgcacaaaattcatttgtaataaatacacattttatagaatctaatctacctacataaaaattaggtactacttgttttatatttttaaattctttttcctcactatctaatagatttaatgtattttctaagttttctcttgtaactaaaactgtaatactactttctgttaaatcacttttcataccccatatttgttctcttttaataaatcttatgctttctttactaggtatctttaaattcgtaaacatattattttcctttaaacatattcttaaatttacttaaaaaactatttctattttttaattcttgcaccttttccttttctaataaactttcagataactttaataaatcatttatattcctttgtttatctacttttttaacaatatttttatttatacttgtcaatttttctaaagttaaatcacaatactcatctacccaatcagcaatataatatattctttctgacatcatagcagttttatatgttctgtctataaatgcaccaaaaacaatagggtctttctcttttgttttaacatttccattctttgctatattttgtttctttttagtataatcagtgaataacacaaaatattcatcaaataatttattatctttacaatatttaatcttttcttgtacttcttttggtataggtctttcaaagttttttaactcaataaaaaatatatttttatcattagtcatatttagattcttaattaaatcttgtaactcctctttatagatataagtgtctattccatagtctaacaactcattctctctttttatattttttaagagaaatgtagtcttttgaactaattttgtttggtctatgcttaatgcactttctaatgtagatactaagttatctctaattgtttttaaactctcatgattaagcacctttttattattcttaatttcttcaaatatttcacttgtagttttatctatcatagacatcacactcctatccctaaattttctttatatttttgtattggaagttctgctctattttttctaaattctattaatgctaatatttctttttgaactgatttactacttataaatagattataaatctcttcaatagaaatttttttaattaatattgcatattctaaatctaactttatattatttacataatattcaaatattttagcaaatatatctttatatcctataggaaaataatatatttccaataaactaattatattataacccgcaggtatataatattttttatacttataatctccaccataaatatttttatccagtctagttttaaataacttttcccaccaagataaaggtttaaataattttttatactgtttatacattatatcactacctttaaattatcatattgagctactaaattataaaatacttcatttaatttttccatatctattttcttaggttttaattcatcagcacaatacttataatttcttattctttcatcaacccatttttctacatcagtttctaatattagtatgctatctttatctattttctttctttctattaagtctataatatattgagtaaaaagtttaccattctctaatctatatgtatctaaaatatcaggtatattatccattatagataatgtaggaaattccccatctctaatcatagaataacaataaaataaacatctaaatatatttaataaatgttttactttgataactttatcctcctctatatacttaatatgtgcttttaaatcttttttagccattcctatataatgatataaacctcttttaatatcaaaatattcatctgctatctctctaagttggtttatataccaaaagttactataagcattatctacattaagccactctaatatattaggattagatttacttattagttttaatgctttatctaaagaatatgcttgtaaatctatatctacatcatcataatatatagcagaaaaacaatctttacttctttctaatcttaaatactcacttaaaggttctatataaatacctctaacatctatatcgctgttccaactttcagtaccatatgctctacttccattaggtactacacataaaaacttaatatctctagtattttcttttcttttaattatttctttgatttcgttttcttttactaatatcattctactactccttttatttttgctaattttaaaaaatcagaataaatagttttcctgtcaatattatcattcataagatatagctctattataccagatatttcatatcctaaattttttaaataaatattttgtaaagctaaacatttatttaatttttcattttctatttcatatttatttttatctttaataataaatgtatagccaaacttatggcaaaagtcttttaatacctctaattcagcattccctaatgagtattgttttcttaatttctttatattattctcttgtttttctataatagatttacaatattctatattttctagtatatacatattttttaatgctattttatcataattatactttcttataatataatctactactgttttaataatatcctttttagtatttccttctcctattattttatgcaccttattatcccaaatataatattttgggtctataatttcatcataattcttttctaatttcatattaagtttatctaaaaataattttaacactttcattttatccctccttaaaactttctaaatttcttattcttttcatttgtttataaattaattctaactctcctaaattttgagaattataattctctttagccttatcaaataagattttttggttaaattcgttattaataacttttatttttaacataattgaatatagtctatttatatatctgttttcccagtattcaatattttctaaaattaactcctgcataagagcatcttttccgttatctgaatagtaaaggaaagtattatactacaattttgtcaatttatccaatttttcttgcaatttcttttgatgaatttcatttaatttaggcacaacaaatttaataaataaccacattaatagtatacttaaaacaaagacaattttagtcatatctattgcaccttcttaattgatttcttcttttataaagtttatatgaatttttataaaaattatgaaatgatataggtacatatttaatctcataacatttataataaattcccaacaagccaaacctataatattctttaattaaacttggaaattttaaaattgctaacatataatcactctccttttattagtaccaagtgtcatacatactaattgcaaatgaatatggataccacccagatttatctataacttctaataaactattagattcaaaaaattctttaatgtctaatttacaacctattaattttgtatcattgcagcttatattgagtataacactttctgaatcaaatcttatacctctaataaagaatgtttctattttgtctgtataatgatttcttaatttacctatataacaatatttattagcaaagtatctatattcatctatattattataaccataagataaaggatacataatatgtccccagcttaattctggattccacatatcttccccattatcttttatataacactctactcctgcacttaaatttgctttttctactaaatttttaatatgtaaaaatactttcttaaaaccttttttaaatgggtaaactctttcgtaagaatcacatgctttatatacttttaatcttttcataatatcactcctctttaacttttgataacctattataacatataaaatatattatgtcaatactttttttgtaaaataaaaagagagtatttaactctctttaatatatattaaacaaattttctccatcttgtccttcattactaaatttaattacataattatttgtcatagggtcttttatacctaatgaatatctattctttgggtctaaagaaataggtataataagtttagtagtttcaatatttaattttactaatggtttatttatttttttagtttctattatattacctaaatcatcgtgaattactaaatcaaaatcccattcatgatagaatcttgaaattcctctattttctatttctatttctatattatcaatatttattttagaagatttaataaacaatctataacctaacatatcagatatttctttactttgagaattccatttagtatcattttctggaattttttgtcctatgaatatatgatgagatttttttatcatttcttttgttctatctaattgttgtaataacatttcatccattgttaaagaagatgtaaattcccctcctattgggtatttatcccatatattaggcataggaattatagcatctgtttcatctgtttggtcatacactccacctttctcaatccaatctaaccactcttgagtatctttaggcatacctatcatatcattataagttcctaaaccatattctttacaaggagaaaaagttcttctcatcataattttagcataaggaaatttgcctacccacatatctacatatttttttaatataggcatcttaggtaattttctaactttgttgttgtcaaagtttacatgccactctccccagtgtccaacaacaccaagctgtatataacttatgaaagggtcatttccatatctttcagctatcttatctacaaatacttttaatttatctataaatttttgattttcataataaggcgaccaacctttaccatattcatgagaataatctttacctaatgttctatctttatatataaaattaggtacatcatgatgtttttttgttgttggctcgtctaataataatctaaatacacagtgtttacccttattcttccaatactgatataatgacaatttttcccatttttcccaatcatatgaattttcatcattattttgtacttcattccacttcatatcacagtatactaaattaaaatctattccacctaacgactgttcccatcttccgtatggagcataacctataaggggattacttactgtgggtttataagtatattcttgtttatcctccacaaattttctaatattaatttctatttcagagtagttactttctaaccattcctttattttaattaatttggtatctaatttatatatatattcttgtatttttttatctaaattagtaattattccaacggtataaaatacaaaatcactaacagcttttaatactttaggtttatcatcaaatatcttagatactatctctttttcataaggtaaagttacacttccatcattccaatcatataaatcatttccctcagtaagcataaatttactaaaatacactttttgtccttgttctatttttggaatttcaaatcttggtagacattctccacttttttcagctgtaaatttataattatatctaacccattgattagtaagattgtatcctttataatcatcagatacaattactgttcctccctcaatattaataaatgcagatatatcattatttaccttttccgttttaatccaagcactaaattgataaattttacctgcctcaactgatactttttgacctactggaatccaagctgtatttatagaaataactttattatcttcatattcttcattttctataatataagattcacggctagaccaattaacattattagaaaaatcttttgttcctttaagtaaatttccaccttgtttattcttaaaaaatttatttaattcttcttctttatttattcctttaataatattcaaataatttttatatttaatataagtagtagatgctatattaatatcaaaattttgactatctatatctataacatctaaattatttatatttagtttgaaagggtatttagacttttgttcctcttctaataattttatggttttataaaaaatattatctatataaatatttttataataaatattttttatttgtgtaaaatctatctgtgccattttattattcctccatttgtattactaattccttaaattctctaactatatttatcatataattattttcttcaatcgaatctttgactgaacatttaagattaaaataaataatctttcctttaaatatttctaatatatcacaaaaaattaatgaactttctaatttatactgatttgaattcaattttatataatttatattgtcaaaactataactaaattctgttacactatgtatagaaaataaattttgaatatctaaatccaaaccaaaaactattttattaacatctttatctataccttgagttcttatataaaacctacttaatacattatcacacatattcatagcctgtattttataatttttttcatttattgcaatatcactcccaactaaatttatattttttaattttgtatataaatccgaagttatatttgtatgtaatattttaaattgttctatattagaatcctcttgacgacttgtatacttataatttatattacctaatatagaattatttaaagtatattctatatcttcttctaaattttttaaagaatatacatataaatattcaggaaaatttgagtcatatcctatataataatcttgaatagaattttcatttaaattttttgtctttattttattttctataacataatatttagatttagttattttttcatattcatccttagatatagtaggaatattaaattgattataaatattttctgttaatttacaatcaaatacccataaagaatctaaaattttatttataaataattctgaaaacatatataaatttaattttgataatttattcttaagtaggatttcattactcaattctttccagatttgttgagaataaatatcaaaaaattttgaattttttaatgatgaaatctcattttttattaaaaaatttatattagaattaaataatttttctatataatttaacttattttctttattaaaatctatttctaatgtaggtgttattcctctttgttgaaaatttcctgctccatgtatctctgttaaataatacaattttattgtagaagtatttacatcctctaaaatgtttaattgacttatcatccatctttgatatgtatttccatttatatatatattacttgggataaaaagagttaatatttctgcatttttattattttttacaataaacaaagaataggttattgttacactcagaccattaatatgtatttcttgtgttttccaatctataatacaatattcattatttattatactaggacttaaatatttagtatctttataggttaatttaccaaattttataaaatctaattctgaattccataatttatgaccccccctatataattctaggagggattcatttttagtttgtattttcaatatgtcattaaaatctatattactcatattaccccttcttaattaaataaaatttgtgagggtctttttgaagtaaagcttcatattcagatttagttaatactacacaattcttttcaaattcttctaaaaatttagcattaaaatcctcagtttttaaataagaacttaaatcaggctcttttatatctaatttaccttttagttttgtgaagtcattttgttgcccttcatctactattttatttaatatagtattcccattaggtaattcttgttcaggaatattaaattctttattagtattatttgttaattcaacatttattttcttaccttgttgagtaatattcttaatacctactccatctaaacctttagcaccattaagcccattttctcccttatccccttttatagtgggtatattgaatttcttattagaaccgtctgtaagactaactgttaattctgtgcctgaacttgtgatattagtgatgcctacaccgtcgttacctttaactccttgttctccttttaataaaggtaaagtaacagtttttatttcatctgtatctaacttaatattaagattattacctgtaagcgaaatctcttttatacctacaccattagtaccttgtgaaccttttaattcaacataagtataagaattttcagtagattttttaattcctaattttgtgccgtcccaattaaaatctaaacttataccatctttaccttttaaactaggtaaatctatctctttattttcattattcattttataagtaatttttttacttaaattgtcataagttaaatttttaactatagtattatccttaacctcatataaagtatttcctttattttctactattgtttctatatcttgattagaaggattaacataagagcttaaatctatttctttacttaatccattctctttatatttaattttattattttcaaagataacttctgtaattgttttttcttttaaagtgtttaaatcagttttatctgcttttaatcccagttgagtaataatagtattaattttattagggtcattacctaaagcttcagcaagttcttgtaatgtatttaaggcttcaggtgcagttcctactattttttgtatttctgcttttacttcttcaatttttactgctgaagctttatcttgtttactatctatactactatttaaagttgctatatcttgttgatatgtaaccttatccaatttagtattcaattctgtttgagtggcatagtttcctttagcttgatatttactatctgcttttgtttctgttataaaatctgtgatttcagattttttagcataattatcaagttcacttttttctactttactatctatactaggtttataatctctatctattatagatttaacttgcccttctgttaatcctcctcctgagttattaacaggtaaattaattcttttaactacatcattttccttaaaaactaaatcattacctgataaagttaattcagttgttgctatgtgttttaacttatcaaattcttttttagtattatatttattatcagcatcaacacctttaataaattccactatatctgtttttttagcataattttgtaaatctgttttatcaactttattatctatactttttgctaaatcttcagccttacctgtataataccctttttctaatttagaattaataataggtaaatagtctgtatctataatttgttttacttgttgtgtagttaatcctccacttccactaggtaatactatacttttttcaataccattttctttatatcttagtttatccccagctaattctaaatctgtgatagtttgagttaatttattagtatttttatctattgatttttttaattggtcagctgttatactcttatctaaactacctctttctaatttactatctatttgtggtttataaagagtattaataagtgtctttacttgttcctctgttattccagtagtaccactacctccatttgataatgtaaattcttttacttgtccgttagataaagttatctttaatttatcccctactttttcaatgttagtaattcctattccatcattacctttttgtccttgaataccatcagaacctttattacccgcatctcccttagctccttttaaactgtctaaaaattcagtttcattagctgtgggtttacttttaactcttttccaagtttcaaaagcagattctcctgtattacctttttctcccttttgaccctgtgtaccattttctcctttaagagaatttaaaaaatcttgttcagtacctgtatttcctttatctttccaaatttcgtaagctgatttaccattaacaccagctacaccttgttcccctttaagtcctctatctccttttaaatcagatttatgggtatctacataatctttaacagatttattaattaatattgctaaatctaattccttattactattatcagataaagtatattttagtttgctgtctattaattcacaatcttttaacataactccaataggtacttgtgtttttattctatctattacatcttttttaattttttctaattgagcaggagttagaggattactagacccaccactaaaaccattttctaagacataatctaatattttattacaagcttctactaagggtaatactcctacatcttgccctattaattgtgcatatattccgctcatagcttctactgttgatttcaactgttcctcctattatgaaaaagctagactaagaatgtctagcttccttttcttcttgaatatgtgttgccatatctacagataatttttgcaacatatcagtcaatttatccattttagtttctaaacttaataattgtttatctatttgttttatctgtatagcatatacatcattatctattttagctttaatcattgccattaattcttgtttatcgtgtttccattctttttgcattttttcttgagatactaatatccatttagtatacccaatgaaaaatcctacgattgttcctacaattttaaaccattcagtaaatgataaagtatccatttatctattcccctcataaactattaataaaatcaattaacacatttacatattcatctatgaataatacattttctttattgttagcgaagaaaggctctactaagatataagtaccttttgagttacaaataccatagcctcctctatctttttctgttttactaggtattattccttttatattatgattaggtctatatttcttaatagcttcaaaatatttatttattatttctttagctttttcgtttttataataacataaagcaaaagccccattagtttctgtatctgtaatacttacaggtgcattaaaatgtaattctactgcaaccttatatttttctttatctaactcacctaataattctctcatttgataagaataactaggattaggttttctgaatagcactcttatattatattttaattcattttgtctagcaagaactttattagcgacttctaagttataatcatattctgacatttttaaaacattagaatatgcacctttggaagcactattatgtcctactattaatacaactgtttctttttccattattttatttctctcacttgattaccatatttataatttacataactttcactaaatcttgaaattgtttttgaaccaaacaaaaacataattatagtatcatttatacttataaaagcattgtctataaccattacaggtggaattttatgtgccattgaataacctaattctacaaagtaatttacgctgaacattaataataacataaataggaatgcaggaataactaagtcttttattctacccagtttttctatataattccctctttcttttaattcttctatttgtaaattacctaatttttcaagtatttctccttgtgttttttcatcagtaggtagaaaaggttttacaatatctataatgctattaaaaagttttcctcctaagaacgaagccaaaaaattcatatcttctcctttaatctctattccttacatcatttattatactttttccaagcaaatttaccaaacactctaacattaaaataaaataaataagcaactattttattaactccatcttccagcatacactctaagaatattttgtcgcaaacttttctatcaatgaattgtgttttataaagaaaatcgtgtataatagcactatctgtccatctgtgaaaaggtggaaatataacccataaaactctaggaatacttgctccatcacatacaaaaccttttggtatttgtattgtaatgtctgttcctacttttctcatagtattttcatatacacttattttcttatttttatgaataataattggtatcaaaattatcccctttatagtgtgcaaataaaaagaatagacaatgtgttgattgtctattcaatatataactaatgaattttaaatgtcaattatttactaaaatcatacttatttatcaaatctattaaatcctttaatagattatctactttttcatattctaataaatttacactattatctctatatacaaatcttatagctctttttaaatcttctttggtttcacatcttttaagagtatcctcatttatttctaattgtattttaaggtcataagatggtgttataagagatatttttatataaggtattactttattatctctcatatctttaacctctttaaacagtcttataacttgtatataatgattttgtcctttacttaaatatttacaccttaacatatctataatgtctgtcaaatacttaatatctattttttggttatacccaaagaatttacacatatcatattgataagcttgttctaataatctaacttctaatttatgatgattagatttattaaattcataaacttccatattatttactctacaataaatacttgctattctatctttttcttgtaaacctactttatatttaaaatctactctaacagaattaatatcctcattaactaccttaatttcttctaattcataccctttcttattacaatctagctgacttattggataatgtaatttagagtctataatattttcacgaagtaaccaatctacaaactcataaaaattgtcataactaaatacattattttcctcaaacattaaaattacaccattcattatatttccttttctcattttatcaactccctagtaaattattataataatataatagcatataaaacaaaaaatgtcaatattaaaataaaggatattttatttatcctttatctcaaattttatataacaaatatgcctttctccttgaacataccaaactaaacaattattatcttggtaacattgcaggtttataattttatccccatataaagaatagaatataccttgtgcttctacccttgttctactaagaaattctactgttaatttaattttctacctctttttctaaggtttttattttatctctaatagtgtcaacctcaatataagtaataccttctatataatttttagagtccatattagtaaccccaataagaattggattattatatgtacttccataagcaattaattgcatatttggattatctttatctttctttaattcaattattacatctcttttactctttttatcctttgctaatatatctatttttccgattttatttacatatatttctgtacctatatatttatacttaggaaataaaaaatcaaaatgttttataatagattttttcaattctttttctgaaaaataaatattttcattagaaaatttataatatttactttttataagtatttccataatttctaaatcttgtatatattttgcataaaaatacttatctaaacttatattaaaattagttattctatttatatcttgtaaacactctataaaatcataaagttgagttttatatactataaaatctgtataatatgattgtaaatattctctaaattttataagaaaagtatgtataaattctttatctttatgaatataatatagtctaattaataataataaataactatggagtttattatctgattttgcttttattctaaaataatcatacactaatttctccatcctacataaattagtgtattcttcctcgtttaaacaaacaccattgaaacaaagacctatatctattaagtccaaagcttcctctctatttaacttatcaggtaaatatacaaataaatttttataataatttaactccatttctttaaaataatatccatttttatctttttccattacacatcattctcctttttaactttcataattaatatttttttattcttagtatcaaactctatatttacacaaggttcttcctctgttacccccatagattcccaatatttcataggtagttgtattctagcatacttatgtttatgctttttagtagggtaatatatatgtatttttgcttctaactttatacatccacctcctaatgttatacaatgtgtcccacacttttatttattttataagagaggtagtctactttacctctcttatttttgttattttactacatcttttacagtttgtgaaaacttgaattttggtgatttatgtgctgggatagtcattgcttctcctgtttgtatatttcttcctgctctttcttctacatctttcacagagaatgtacctaatccgaagattgatacttctattccatctactagagcgtctttgataatttctaccacacctttgataattgtttcattatctttattagaattaccaatgcctctttctcttaaagtttttgcaatatatccaatattaattttattttctgccatattttctccttttctctttaatttagatttttataaaaacataaatatacagaacttgccgtaacataacagtgcataagataacccctgtactaataaatgtaatatataaaatttgtagcttactattcatcttcttttattgttcagtttgctgtaaagttctgtatattttatctacatgattaacagttgctttttgttttaatattatatttcaatttttccgaattataaatttgtatttacaaaataagttgctgttagcaactgtataataatttttaacagaatattttaattagctgtatatattaaaagtatattgctctattaactaagtatttgcagttatattctgtatattatttattttaaaagaacatattttattatactttccagaattataatcattgattttatattgctgtaatgttctttatatttgtattataacatattaattttattttgtcaagcacttatttagaattttttaaaattatttgtgaaaatatttcaatgaaattgttaaagtcttgataactataatatttttcattaatttctaaaataggtgctgacattatccttgatttacttccaattctcattagttctttttcatcatcaattacctcaaaagatatattgtaattagttagaacatttttaagtcgtaaacaattaggacaattattctttgtataaatttttaacatattattatttcctttttatttttaatggtcagtgaggtagaaattgaatctacgaccttctgttcccaaaacagatgttctaccgactgaactactcactgatatggaatactctactggtactgccccagtttatcttgttttgcagacaagaacctgacttctcggtcaagagtatatactggacgcgacacccacatttgcagagggatttctagggaatgagcctagcgagttactttactccatgtcgcaatatgttgcatttttaaacacaatcactcattataaggaaagagtaaaaatgctaatctccctaacctaatgtagtctaaaacttttgtgcataagaaagcactacaccatctgcttttttatttattgcaaaaggttagagtcgaatcaacgaactaggagctacctatatcttacctcttgattacttttgcatattttacaatcagttctagtggaactttgggtcttggacttgatgttccacatctgaaagagagatagttatatgtagtcctatcagctagcttcgtctactacacctcacattgaattccccaagataaatatctctatttataaggttacaaaaggtatctcttgtcccttttatcgtcaaatagatactcaactttacattttattctgaaaagatgtgaattttaatgtaactttgctcaaaagacataatggaaacttaatataatcttttagttgagtatctatttaacccctcatttttacttatgtaggataaatgagagataaacctacctatttctacaagtttattgacctaaaacttagtagtaaaaaggctcttttatgataaagagtaactgattttatttttaaaggctttaataaggtatctttaagagtcaaaatcctaaaactcgtttttaagttttattggacaagggtgtattagcaagggtaagttcaaaaccttgttggctaactacctcatcacttgctgtctgaaacctctagcgaacttacaaggaaagagtgtgtcgttacaacttccacagccaaaagttttaatgtaagtgaaatctcaatctctcctaatattcatcttacacaataagtataacatacttattaaactttgtcaagcaattttattaaataattaataaaagttctatatttttgttattttatattagtatttctaataaaaattttttataaaggttctccttttagtcttttaattgttatctcataataattctcatctatttcacaaccaatacattttctatttagctcttgacaagctaataaagtagaacctacaccacaagcaaaatctaatactacttcattttctttactagagttttctattaatattttcatcaattccacaggtttaaaggttggatgaactactttaccttccttatctttcaatttaatattgggtacatttaaaatatcacttgtaccacaattattaatctttataccttttccttttctaaaaaataaaatatattcaaattgggacatataatattgccccattattttattacctttattccatataagagattttataaaatgaaaaccattatcttttgctacattaagataattttgtagattaatatgattacacattatatagcaatgtccaccctcttttaaaagttcataacaatatttaaaccaatctttacaatctaaatcattatgcttaaacactttatcttgtttattaattttttcttgtaacatacccccactattacctgcattacctctacttgtaactctataaggtgggtcacatactattaaatctatcctacctttcattcctatattgattaagttttgcataataattaaacaatcttcattatatagttttatttgtttatcctcactaaaataataattcattctatttcctttaaactataccaagcaatatattttgccgaatatatttttatattaatttaaggggtgtaaacgaagtcgcttacaccccttttagttctattgtaattctattttacccaatctttatatctattaataacctctacataattaactgattttaaccaattaatatcttgtagagtaacccatttcataaaatttatttcaaaactatctttacatattctaaatgggaatgcttcttgccaatgctttaaataatattgataacaatatcttacacttttccacttattatagtaattagatttccatttaaacataaaacctttttggtctataaatacaaaaccttcaaaatgatgatatttatatcctagtaataactctttgaactcgtcaaaattatttaatatggctactgtatctactattcttataattttgctctctgaggctttcagatagtctttaaactcatctaaacactttaagctataatttatatcaatattaaccccattgacctctaaactgtttttaaccacatctaagataacaagttcttccttatcaaaatctattatatgtttatctttaaaagacttaacttcaaatattatagtacaattttctttacttgcaaactcttgtagatacattttaatattagcattttctctatcccataattcttgaaaataagttttccaatctccttgtgtagtagattttgttgctaacactacttctccgtttactactgacataagccctaaaaaaccattttctttgtatgtagctaataatgggtattgtaaattttcttttaaatattcatctcttgtttctttaaactctaaataattatgaaatttgttatatgacctaatttggacttctccactatctttatcaacaaataagcctcttgcttttattgtaatatcattccattgtttctttctaaatacattatctccaaagttgagagataataagttaggttcacactgtttaacttttaccaacttactcaatataagtttattgacttcatcattttgagttaaatttttactttcagttctattatatttttctctttctctattgaaataatctttgtcataaactccattcttaatcttttcaagtcttggtgtttttcctttttcaagtacatagtacattaaatttccaccaaactctacttgaccctctaaattaatagaatgttcagtacatttattagctctatgtccaaatatttgagtaaaatcttgacattttcctagtgcataattattttcataaataccactaatatcatcttcataatctccaattcccttaatcatatcatctgttgctatataactcatcaaaggtactgatggaagtcctgcgtgtgtacataaatactttttattatcaaattcaaaagcataggcttgtctttgtttcttataaaattgtcttaacttagattttaattgttcaagttcttcatcattgagtccatctataagtataggtaaagtttcattaagaaatttcttgctttttatttctctaccttgaccgtaaaaacattcccaactatgattcccttcaagtaatattacattttttaaagtagatagatacatcattctttttagagtttccttatgttcaacacctctgtccaaataatcgcctaagaacacatataaagtatcctctctaaattcttctttatcaaacatttgtcctaaaactgtattacaagaatgtatatctccaactacaataactctattatatttgtctgtaatattatctacatagaaattatttatatcctctattttatcaattttttttacaccttttgataattctgtttgactgattagagtatgacatcttttgattgcatcctctggcacaaatttatacttatctcttgttctgtttctttctaagcaagtttccaaaggtacatctaattgttttacaaatatagtatatttatacatttctgccattgctttataattatttaacattttttgagtagaatgagtagcatttataattgtaaaatcccctcttttcattctttcttctaaacacttaagtaacatattccaagcaatcctatcatttttttgacttataaaaaaattaccttctaagtctaaaatagggttacatatttgagttctaaataagtctgcttcaagagtataaggctctaatctattttctttaatccaataatttttacctgacccttgagctcctctcattaatagtaatgttctcattaaatcatctccttttatattttaatcttatctaatttttctttaaattctctatttgtatcctctattgtaggtattttaacatctgaatttaatgccaattctcttgtaataggtttttgttgaaacacctcatttctgaataactcatataattctttttgtgatatagtaagtatacctatacaatctgtaacatataactcaacttgattcataaaatattgagattttataaaagtatgtctaggaaaagttttaatcatttcccatagttcataataattagaaccaactattaaattatctctatattttaaatatccaatttcaatccaagatttcatatatctttcaaactcataagttccaataagtttatttcttattatatgaaattctttataatggtaactatctaaaaaatcagatactctacaataagtatacacttgttgtctaaaactcttaaacatatctgtaattctattttcaaattttttataccctatatcttctaaaaatttattatctgtttgttcaattagaactctcatactttttacaaatataattactacatcttgattatatttctttttaaaaaatttattccaatgctctctatacattttttctatatctaaccaagtacatttaaaagttaaattattgttacatttctcttttaccaatgtttttataaagttatcatattgtttttgttttgttagtgccaaaatatcacttcctttcttccatgttaattttaaagctctgtaatacctttaaaactaattttataactaagccatataatttatccaaaaagtttttaaaatcatttttagacataggacagagctttaaaattaatttttaaacccattagtaagaaaaataatacaaatcagtttgtcctattaaatcatattcacatagagtatttaatttttctttaatttcctttacattataatttgtattttcaaattttactttttcaattatatcttcaagagtaaaatttcctttcatagaaaggattaaacttgctatattagatttgttttgtttaactattttcttactaggtttaatagttataatttgattttctatatcataatctataattacttcattgttcttttctttatcatatcccatagcctcaacctttttcttatttaggataagacgaatactctcgtaacctcttcctatgttaagccaatttaatttactcactttcatactatcaactcctttttatttttaagataacctattatagcatcaaaaattaaatatgtcaataaaaaatttaaaatattttaataaaaataaaaagagtagaaaattctactctttatcttattgctttcttataacctaactcatctagtaactcacatatcttttctatacctttttggtatactactgtttgaggaactactttatctcctttttctgttactataattttaaaccaaccagcatctacatatttttgataaggctcattatttcctcttaatattccatttaatcttagaatttcaaacaatatatttctgcctacaccaatataatttattagtttagcaacctctgacatagtaaaagtcttatctttatctgcaatagtgttatataaatctactttatgcttttgattttttaattctaagtcttttaatattcttttatctgtttcttcctttaaattgttttctaagggttgaatatactctatattaaactttgctatatttgttgctatttctagtttagactgtgaattaacaatgtttagcattaaaacatcttttgtagataattgattttctaactctataattctcttttctaacttttctaagtaaagtatgactgctcttctaacaaatttagattctctcattaaaacttgtttagcctgatttaaagttaaaacaaacataggatattccttgcctctactatttatataagttgactgggaaatttttcccagtgagatttcttcctcaaattcatctcttataactttcaataaatcattatgcccaagctctgttctatttccttcttctcttctaaatatatttatctgctctaacagttccaagctagtgatagtatccttaactctaatttcttgtttaggttcttctttcactttcttattaaagaaattagaacacatataattatacctttcttttgttctattatcttctaatatctctaagaattttaaataaccagtatctgatagtaaatacttatcctttaattccaagttattattcttatccacttcaattaactctttactttcaaacttatctttacacagacttataagttcttctacatctttgactttatacttatgtagacttgcaatatctattgtccctatataagaaataccctctacatttaaactcttaacttcataatctcctaattttatcaaactattcaaactaattttcattacacatcactccttttaaaagctctgtaatacctttatttaacattatgtatataaaggtatactctttataatcatcttcatctgtttgctctaattcatacttataattcattttaataataagcagagttttaccttttggtacagaaaatatagcatctctttcaggttgcattttaaaatagcaacctcttttaaattcatttctaaaatattttcttatttctgatgtatatttaatattccatatacctttctcatacaaatcattccatagagtaaaactattatatttgttttcctcttttgattgaatattaaaagccataatatatttacctataaaattaatatatcttttaaatcctatttgtctagggatatgataattataagtttggattaatttatagtttcttttcttattcataaattatccttgttgcatactctctaattcttctttactaaaattattatatcttctcttccattctatgacaaaagcataagctctaattctactaatgcaccaaaatcctcccataacatcttttaatttatcatacttgtctgcatttagcatataataagtaaatattaatatatgagccacatctcttaactctaataatattttatcttctaaattagatggaataacatcattattatttatatctatttctttgtatatccacgaatatgatttaaagatttccttattattataaagttcagctaatgtcttattactaatgtgtctaatcaaagcaaaatgaataatattgtccttataaagtttaaattctatttttatttgattaccttttattacactaatattaattattttcatattgttacttataagattacattgttttgttacttcactatctataaagtatgcaaagaaaatttcatttaatgtaactcctgtttttgtctctttcatttatggtatacctcctattaataattatattttaactaattatagcatacttttttgaataagtcaagtaatattttataaaatattatcaaatatacttgactttatgctaatattatgatataatacaataaatttgcttaggagtattcaacagagctaaagctctttggattgtgttctctttttctatatatatattatattgagtatttctctgaacacaccaaaaatacaagtgttgaatagtgtggattttgcctatattttttaaaaaagccacaacaatgaaaaatagtatagttgagagaaattttttacaagcctcaacataccataaattcggtgattaaaaatcttagtaaatactactatttgaatgcacatattattatttttatattggtatcactgaataaatttttgattaacaaatcactaaattaactataaaaattataagaatgaatatgatacataaaatacaaatctattggaatataaagaaaaataaaaatatacataatattaatattttatggacataatttaatcaacataagaatttatttaaagtatattgactttttctacttccaacagttaaaaatcttagtatttatgctatgtttaccacaaatggataacagaataggaggtattaattttttatgaaagaacaaaagaaagaaacaaatatggaaagatggatagaactgaataactttaatcttaggtatactgcattaagtgagaatagaaatacaaatatacaaatagtagatgcaatttgtggtaaaggtaaaactgaatgggctatacaaaatttaatagataattacaaacatcataaagataagtttatttatgtaactccattcttagaggaaatagacagagtatttgagagatgtaaacaagaaaatatttatgtttacattcctaaatgtaaaaaagatgaaaattcaaaagaattattatcaaagagtaaagatgtatataaagctatgcaagaaggaaaaaatatacttatgacccataaattatttgaatatattactattgattggtgtgaggaaatagaaaaacaagattatgatttatatttagatgaagtacctaatgtattttcttataatactttatcctcaaaagattggaatttattattgtcaaataatatgatagcattaggtacttatttaaaagattgtaaatatcaagaagttaattggttagataaagagtatctaaattcaaaagataaaaccaaagggttatatgaacattttataaataaatgtatatttggacaagtattaaaaaaaggtaatttatatatttatgctttacctatgcacatattttttatggtaagaagatgttatattctaacttatatgtttgaaggtcaatatttagcaggattattaaaattatattctataccctatactttgaaaagtgtttataaacctaattctaaatattttttaataccttataatatacaagatactattaaagattttaaaaatatgtaccctaagattcatttatatgagggttctttaaatagtgaaaataaaaaagaatattctttaacctatacttacttaaacaataaaaataaagaaaccgagattaaaaagttaaaagcaaatgttttaaattatattacacatatatgttcttgtaaagcagagcatatattatggactacactcaaagataaaaaagaatttttgaaaggcaaaggttatacaaaagaatttttatctctgaatgcaagaagtactaataaatataaaaataaaactgtattaatctatttatacaataaatatataaatcctatctatgaggatttatttgatacaatagggggacatataggtgttcgttctcaattagatgaagaattatatgctctatctgaattagtgcaatggatatttagaagtgcaataagagagaaaaaagatatacatttatatttgccttcttatagaatgagagaacaaatatttaagaattttgaagaactttttactagaagttatgaaaattataaagaatacataactaaccttagagaacaattatcagaattttatagtaatcctgacaacaacaaataaaaatgttataatatatcataaaatataattaataaggagagtgataaacttatggcactaacaaaaaaacaaatgggagtggatgcttataaatggtgtttattccttaaaaaagaatttaagataactgatagtgtagcttctgctatatattataaatatgtaaaaggtgtactagcagatagagatttattagaaatagggtataaacctacaagagaattagatagtgtatggatacctaaatttagagcagatttacaaaattttgtaaaagaggtaaaaggaataggattacaaaactatctaagaatagttaatggatttaactttgactatttcacaatcacaacttttaatgtacttatagaagattttattgctaatggaacagaggggagtacaatactaccttttagtaaattctttgagtatgtagttaagattactgatgactacaaacaacaatataataggacagtagtagataagattacaagagagaatgtattagataggataagagtatctgatgtattattgttagatgtacattgtaaagttatagatgtcaaccaagagggatatgcagataaggtggagtttataacaagtagagaggcttattgggtggaaaaaactttatttaagtatctaaaaatgttagaacaagaaaaatatgattatgtaacacaagaaaatattgattatgtattaaaaaagaataaggctaagttgaatgaaaaacaaaataaatttatacaagagttctcaacatatgggtttaactgtcttataggcttaggaggttcaggaaagtcgtatacttctaaggttgcaatagatataatagttagaagtggctataatgtggtacttatgacccctactggtatatcggcaaaagtattaactaattacacaggtagacaagcctttactgttcacagatactttttatctatgaaaggtgtaggaaaatcagaagcaatagataaagaagaagatttatatacagaaaatatagatgaaatggtatactattgtgatgaattaggtatgtggggattaactcattttaaaatgttatgtgataatatattagaacctgcaatggcttacagagaaaggttcataatagaaaaccctgatgtacctaaagaagaaatacctaaattacctaaattagtatttgtgggggatacaaatcagctccaacccatctcgagtggttgcttctttagagatattttagacctaataaaaataggacaaataaaagctaatttaacagaattaactgaaattatgagagcaaaatcagacacatatattccctatatctgtaataaatattgtgtagactattcccctatggaagatactatgtatatgaatgaagaacctaatgtatttatgttgcctctatcagaagaactagaaactggggatgccttaggtaaatttatttatgagtatatgcaagaaatgaatagtgtagacccaaataatccttataattttgaaaatactactattatgttgccacaaaaggtaggggataaaggtactaagaaaattaatgaagtcttagatactctttataaaaaagataaccctaacgctaaaactattggtatggttatgaaaaataattatgatttaatgatattcaacggagatagatttagattagagagtaaagaagtttatgaggaaaatcattattatgataaacaaggcaaccaaaaagtagatatagtatatgaatatactattactatgctagatgatgatagagaagttaaatttaaagatggagatgttaattgggaattagcttattgctcaactgtacataaactacaagggtgtacatcagaaaatgtaatatttgtggcaagtagaacacatacatttatgttgactaaacaattagtatacactgcattatctcgtgctagtaaaactttaacagttttatatgataagtttacttttgagaatgcaagaaaaagagatacaaaatataatagaaaaacatttttaggagaaatagttaaattaagaaagggtaaaggtggtaaatagtatggaacaagaattaataaaagtagaaataaataacaataatgaaaaatgtgtaagtggaagagaactacataaagttttagagataggtactagatttgatacttggttcaatagaatgtgtgattatggatttgtagcaaatgtagattttacccctatgctcaaaattgtacacgaccctattactaaaaaagacaaagaagtgttagaagattatgtaataaaattagatatggcaaaagaaattgctatgatacaaagaaccgaaaaaggtaaacaagtaagattatattttattgaaatagaaaagaaatataataatatagaaaaggaagatttattattattaaatgtagttagagcagaaaataaagaacaaataagtttagccttaaatgagtatagaactcaaatagttactcctttaaaaatgaaattaaatgaaactaaacaaaaattagaatataaacaagaaataataaatggcttaacagaagatacaaaattacagactcaaagacaactattaagagaaattattaatatgaaaggaacatttttgatacaaacgaggtggaatctattatatgatttctatgataaagttaaaaagatgaaagtcagagctagatgtgaagggtacaatttaaaacaaataaaacaaaaagataaattaagtgttctaggttacatagatgaaattctaggggatattcctacattatatggattagcagttaaattatttgaaagtgattttaaagataaattacaaaaatatatggaggcattataatatgtttgtagttagtggattattaaatagagaaacccaagaggtattgttagtagttaatggtaaacactatgaatggggagattttaatacaaaaatacctagtaaaactttaaaagttatgtatttagataccaacagagatatagacgggatattgaactttctgcaagaaattttatttatagatgatgagaataatgttaaaagattgactacacaacagttaatggaatttagaaatactaatccattttacctctatgtattaactcttgttgcttactggtgtttatatgtcgtaaatatagataatagggattttgatacttatactccaaaagaattattttctattgcagaaaaagatgagtttgtggtttgtttagtagaaaatatgcttgacttgtttggtgaacttaatttaatcaatatatttcctactaaaaatgatacatcaattctaattggtttagatagtcaaaataagcctatctacaaagagggtagtataattacaggtacagaggaggaaatgccaaaatgggtcaattaaagctgtcagaattgaaattaaaagatgagatgagaaaatattttaatcttaaagttgaagaactacaaaatagagtaagacaacttagattaaaaaagaaattttatatattaacaaatgaaaatgataaaggttgtatgctatatgcaaaacatagaatggcttttggacaaatgttaggcttagaggtagtagcaatacctgttacctctatacaagtcttaaaagatgttctacgagatataaattgtaatagaataccttgtatgttagatatgccttgtgaagaagatatttataagacatataagaaattagtagcaaaaggtttagatgtagagggattagatatttcagaatggttagatacagacaactatgattatgcacctgcaacgccaaaaggaataatgcaatttttagatgggttaaatatagaggattttgcaaagaaacaaataactattataggtaaaggtagaacagtaggaaagccattaatgaatatattaactagatattataataatgatgttatgtgtgttaatactaattcaagttatgattatatgatgtttgcctgtaagaatgcagatattattatatgtgctagtggagtaaggggtagtataggggattttcatacaagtgatactaaaaatgtattagtatttaatgtaggtacttgtatacataatggaaaattagttaatgagtatcaacctgtcaaagagaatattcaatatacggatacaaaggacagtgtaggtatgctaactttattagctttatttgatacagtagttaaaagaatggagatataatatatgaaaaaatttagagaagtagatttacatagttatttagaaaaatatggttttcaaaataaatttttaaatctaaacgaaagaaatgcagaaagatttgaaaataagtataaaaagtttggattagatagaaataggtatacttatgatgaatttttactagataaaatagatagtatagttcttatgttagaattatgtcaacctttaatagataaaaacttagataatatatgctttgattggggtgtcaataatcttatatttgatttaaaaagaatatttttcaaaacaaatattttaacagatgaaagtatttattatgacgatagaattaaattaaaagaagtagttatgcttctatgtaaaaaataccaagaaaatattaaatataatataaagaaagtagagaaattatttgatgaattagaaattgggttaaaatataataaagaattagaaaattatttagaaaagataggggagtaattatatggatttaagtaaagaattagacttattaaagaaagaaaatgaagctttaagagtacaactgaaagatttagaagttgtagcaaatttattttggtggaatgaaagtcaacccagcacaatagagaatattattaggatattagattctgtgtatgaggataacacagttaaatatatagaaaagagtaatgtataccacgaaatatatacagagttaaaaaatagatttaacttagatttattaagtaagtatatcaaggctaggaacttaaataagacacaaactcaaagtgtattagattatacttgtgaacttaaatatgatgacttactcttagacttaattatatatttttatcctaaaaatgctaataaagttttaagatattcagatattttatttaatagagtttatgccagagtatgtgaaaaatttagagaagagtagaacttatctactctttttattttattaaaatttttattgacattttattttatttatgctataattagttatcaaaaataaaaaggaagtggtgtaatatgaatgaaaaagatttaagttatgatgtaagagatttacaaatcgcaatagaacattgtaatgaaaaggtaaatactcttaaaggagattgtcaaaaagagcattacaaactcttaatgatgttattagatttgaaggagtataaagtacagaataattatgaacctaataatatctatacaattaattccttgaatgagataagacaaataagagaacaagcaaaatgcagacaaattttaattagtaaatttaatttattagttaaaaaattgaatgaattatttaataaagcaagtttagaattagattgcaaacaagagtatttagttatccgagataaagacaaggaatattggtttgattatacttttatagataataaattaaatttaattctaatatctaaaatagatacaatgaatataaaattatacaaaaaattaagtggagtatttgaagatattttaataacctgtgataatttagaaatagatgtggtatagatatgttagatgtatattatcaaataagattaacattatatttttcaaaattaaatttaaagaaattatataaaaaattagaaattaatcaaaatatattaaatgataaatataataaatatgaaatggcaaaaataatggctaatgatgatagatttactgctttatttttactttctaaaaaagactatatgaaacaattagaaatagtgaacttattaaaaagaataattcaagataaagaaagaaaaataaatagagattaagaaaggagatttaatgaaattagatgagagaatgaaaaagtatgaatatgttactagacattatttaatgtgtagaacacctgttattgtaagaattgatggtaaagcttttcatacatttacaagaggtatgaaaaaaccttttgaccatatatttatgaaatctatgcaagacacaatgaaatatctttgtgagaatgttcaaggttgtgtattaggttatactcaatcagatgagataagtttactattagtagattatgaaaacttagaaagttgtgcttggtttgataataacctaagtaaaattattagtattacatctagtatggctagtgcttattttaatattatatttagatataatgttgagaattgttgctatgatatgaaaggaagtgcagaatatagaactttactaagacaaaaaactaaagatttaacagtatttgatagtagagcattcaatttacaaaaagaagaagtcaataattattttgtttggcgacaacaagatgctattaaaaatgcaatacaaatgataggtagagcttatctcactcataaagaattagagaataaaaatggaaaagatataattgatatgttggatagtataggtgtaaattatcattcatttctgacttgtgaaaagagaggtagttgttgtattaaaacagaacgaggttgggtaatagataaagaaatacctatatttaaagacaataaagattatattgaaaaattggtttatattggagagtgataaatgtttaaagatacatacgaatacgaattatataaagaagagtacttaaataaatctcatgaatttttagagaatgagttaaattattatactagaaaaattaataaattacaacataaattagaaatcaacagagaaaatatgacttatctcaataaatacttaaatagattatctgaaagaaaatatttatggaaaattcatgttattaaagaaatattagatgaatatgattctaaatataggttaggaagcgtgttataaatgaaatgtagtgtttgtggtaaagacatagagggtaaattctataaggtatatcctacacaagaaaatgaatattatacaaataatgatactctatttgtatgtcataattgtgttagagttagaacagttaaggtatttaaggtaaaacaggggtataacttgcaagatttagaatttacagaatataaagattgtgatacttatgataatccttttgtatatgaattaagtttaaaagatagaattaaaaaaaaattaacttaaaattaaaagagttaaaaggcacttggagtttaagtcaacgatatttattagagaatgaattaaaggaattgttatatgaattaaatcagttagagaatgggagtgatatgtaatgcaaaaaggaattaaattaggaattttaggtggagtaggaatcattatattagctttattgttttggaatgggtatacagtagatacaggagaagttgctattattagtaattttggtaaagtatctaagatagaaacagagggattacattttaagataccttttgttcaaagtagaacttatatggaaacaagagagaaaacatatatctttggtaaaacagatgaaatggatacaactatggaagttagtaccaaagatatgcaaagtataaaattagagtttacagtacaagctagtattattgaccctatgaggttatatactgcttttcaatcaaaatatgaaagtagatttataagaccaagagttaaagagatagttcaagcaactatttcaagatatacaatagaagagtttgtatctaaaagagcagagatttcaaaacaaatatatgatgatttaaaagatgattttgctttatatggtctttcagttagtaatgttagtttagttaatcacgattttagtgatgattatgagagggctattgaaaagaaaaaggttgcagaacaagaagtagaaactgctaaagcacatcaacaaaagttattagtagaacaagaaaataaagttaaattagcagaatatgagttaaaagaaaaggaattaaaggcaaaagctaatgctattgaaagtaattcccttagtccacagttacttagaaagatggctattgaaaagtggaatggacaacttccaaaagttcaaggaaaagatgctaatacacttatacaattagattaatataagagatagagtagttgtttggctactctattttattattttttacttgacataaatttacttttatgctataataattttaaataaaataaaggtaggtggttaaatgattttagtttttaaaatattaatattattgttaggaattattttagatataactgctataattaattttgttgcaggaaaatctgagaaagagagattatatagtgttattctaggttttgtaggatttgtaattactagaattatgtttttacattttttaaggtaggtggtatatgaaatttgattgtttaggagaaataacaaggagtaatattaaattaattacaaggggagaattagcttattatggtttaactattaaacaaatagattttattaacttagataatggttggaaatttgaaatgctgatagaccaaacacaagatagtttatatgttatctatgataggaatacatttactgatatgaatttatataatcaaataggtgtgtattattgttattctaactttaaaaaagaaaatgaaaagtattatgataaactaagagaaaataatactattcaaaaaattaaagatagaatacttaaatttttatgtgatgttgcttatcacagtgaattaacaaccattataaactatcaaactatagataatttaaggttgctatgtaaaaatgtgtatgtaatttatgaaaaagataataattttattattcagcttatgaaagaagattatactatattcgcaagtatttatcttagagtaaaaaataatggaaaatacactttaaagtggacagtagaagaacagaataatttaacagatattattcaaactcaacaagagaatactacacttgtcagtcatgttatggtattaaaaactttatttgaaagaaaggggttgaaatatagtgaaaatttttaatatatggggtaagttgccaaatgtatttgtaaaaacttgggagtgtggagaaagtgtttattataagactgttttagtaaatggtaggtatagactttataaattaatttatagatactctgacagttatgagattactagatattggaataatgataaagccctaattggtaaagttaaggaatattgtggaattaaaaattaaatcaattttaaagccattagaggtactttaaacgagttttataaattaggtatataattagttacctgtggtatataaaattagttttaaggctatgtggtggcttataaataaattttgaaaggaagtgatagagatagaaaagaaaataatcagagaatttaattgtcaagtatgtggtaaattagttcaaatagtagataaaaatgacaaaagaactaaaaattgtagtaaaaaatgtatgacaaaaagtttaaatgatagacataaagcaaaatataaaagaataccaaagactaaacctcttgtttctcaaataagaaaagtaattagagaagaaaatagtaatttatattattttattgaaaatggtgtaaaatttaggtgttcagagaatggatataagaaaagagaattatttgatgaaaaattattaagtaaaaaaggaaaaggttggagtgaatccgactatatagaattagttggtctaaaattaggaaaacttcataaggatagagatattgctttattattagaaagacctattagtgctattagacatagattttatcttttaaagaaacaaggtaaaatatctttatacttagaaaaatttaagaaaggaggtaaaattaatgaataaagataatataataaaagtaagtatatttattatttgttcatttttagtaagtatacttgtgtggctacctatatatttaacaacagcaatactattagcttatataggaatgttattggagagtattaattttataagtaaaaatactttaatagcatatttacttagtgtaagtaagatagttagtattataatttctgcatatataggaatatcatccagtaaattaattcttaaagaaaaataaattattaacatatagaaattaaaatgttataataattttataaagttaaaaaggagttgataaaattgaaaaaagtaaaagaaacagattatcaatttatgtgtagacaaatagacaaatgtatagaggaattaaaagatttaaaaagtattcaaactataccttatgatttattatttacacaagaaagaattaaaggtaatatttataaatccaaagttaaaagagttagacaaactattaatgcttgattaaaacaagtagaatctgaagaatggaaattaaaagagttggggttgatagaagatgaaaatattaattagttgtgtaataggtaataaccctaatgctattattacttataataatattagaagatatgtacttaatgtgaatggggataaatttctttctaaaagtacagaggatagacttgcagggttagatttaatgtgtaaagcagaaatgaaaatacaaggtaaagtcaaggtattaacttatcaaatagagagtgatgactaatggctagtaaagtttatgcttggtataattcaaatttagacaatggaatagatagaaattggaatacttgcaaggaaagaaaagcattaaggtataaatcttttaaaactttacaagaggcacaagattggttagatggtggtgctaaatatgaaaaatctaatatagaattaaatgagggtgtatactttgatagtggtacaggacgaggtagaggaattacagaagtaagagttacagataaagataagaatagtttattaaaacatcttattactactaaatttactcaatggttagatagtttaggttggaaaataaatgaatttgataatattgaattagatatagataaatctaataattatggagaactattaggtctatatttagccttagaaattgcaagaaaattagggtatacagatgtatatggagatagcaaattagttatttattattggagtaaaggacaatataataatctaccaaaggaaacagtaaaacttatagaaaaagtaacagagaatagaaaacattttggtggaaatattagatatattaatggagattttaatccagctgatttaggatttcataaataataaaattttcacttgacaaagttaattatgtatgttataatggttatacaatataagaagagtaagaacacttactatttcaagtgtgagataaatttttgaaaaggataaatatgaattatgtaataactttaacacttaaaacagagatatggcaagaacatatattagaaaagagaagtaatattggtagacacatatataattgttgtcttaaagagattatgaaaagatttagaaaacttaaaaaggataaagaatatagaaatataattaattctaatgataaaaagttaaaatcatctatattaaaacaattagatgaaaagtataaattatctaaattttctcttaataaatttgtaaaggatatggctataagatataataaaaatattgggtcgcaaatggcacaagaaatatctgaaagagcatatagtgcttattatacccttagatttggtaatgctaaaaatgtttactataaaaagtatggagaattttattctcttagagagaaaactaataaaacaggtttaagatatgataaaaccaacaatacagtaacttggttaggactcgttatacctgtaataataaagaaaaatgataaatatatattacatagtttaaaagataaaataaagtattgtagattgattagaaaagaaataaaaggtagatataaatattatatacaaataactattgatggagtaccacaattaaaacatttagtaggtactgatgaggtaggaatagatataggaacatcaacaatagcaatagtaagcaataataaagtaatacttgatagactagcttatgggttagataacattgatagagaaagaagagtattacaaagaaaacttgatagaagtaggagaagtaataatcttaataaatataatagtgatggtactattaaaaagtctaaaactaaatggatatatagtaataattataagaagataagagctaagttaaaggagatatatagaaaattaaaagataaaagaaaattatctcataataaattagcaaataagatattagaattaggtataaaagtaaaagtagaggatatgaactatcaagcattacaaaagagaagtaagaaaacagaaatatctgaaaaaacaggaaaatacaagagaaagaaaagatatggaaaatcattattaaactatgcacctgcaatgttattaacaatattagatactaagttaaagtattatggggaaagtttaataaaaatagatacaataaaagttagagcaagtcagtataatcatataacaaataagtaccaaaagaaaaagttatatgaaagatggaataaattaggaaaggataaagtacaaagagatttatatagtgcctttatcataaagaatgtaaaagaagatttaaaaagcatagatagagaaaaaatatttaaagaatacaataattttttagaattacataataaagagatagaaagaataaaaaacagtgatataaaaactttaaaatgtatgggattttaaaagagatataaaaggttttgaaccgagcctacaagatgtaaatgttctcattggagagcttgtctatgaaagtcttatggaataataattagtgaggtaacacgattacatagttacttagaaagttgtttagtacataagaaccctgcctatttatatgtgggaggttcagcaaggaagtaaaaatagattatcaaaactatttgtaataaaagattattggtggaaaggggttgagatatgaaatatttaatttatacaggaatgaatgattatttagaagtaagtagtttacaaattcaaagcagaatagtaaattatattttaggtaaatttgagtatgaatatgaagttgaaaatttaatttatgacaaaaatactgatacttataaagttatgtttggttataatcataatttacaagaatttttaactttcataagggatactcacaaatatttatttaaagataatttaaaagatttaaagataagtacaaataaattaggacatattttaaattcttatttaagtattcaacaacaagtaaataattgtgatattgatatgcaagatattatttttgttttaaatttaggacaagattgcgagttagaattttatgggtattaagatattgtttttagactttgacggggtagtaaataacataggtactagaagtggtatgggattgaatataccctttaaatgctatgataatagtattagattaactgattggggtttcgagaatatagaagtatttaatcaattattaatgtggtgtttagaaaataatgtaaaaatagtaatatcatctagttggagaatttgtattggctatgcgaaagaatttaatgaattttttgatactgtatttcacgagtattcttgggtaaaaagagtaaattcattagacagtttaattatagatactacaggtaaagccagaactaatagagaactagaaattaaggaatggttagagacaaataaatataatggaaaatttgtaatattagatgatgatgtaggatatgacaataaatattttaaagatgaacagatagttaatactaataataaagtaggattaactaaagaaaaattggaagaaataaaaagtaaattaaaagattaaaggagtgtataagtaatattatacataaagatgaaggagtgatgtagttatgtcagaaagaatgttaatcataggtgaatcctcaagtgggaaatctagctccctacgggcaatgagttctaatgataccatagtaataaaatgttttaataaaagattaccatttaaaaatggagataataaatttaaagtatatactccacaaaattatgaagaattagtaggagctattgtagacataatagaaaaagataaaaataaaaaagtaaaaaatatagttatagatgatattatttactttatgtctgatgagtttatgaaaacaattaatgttaaaggctttgaaaaatttagtaatatggcatcaggtttatatggagcatttaaagatatacctgacttattattaaaggatagacctgatatcttagtaacatttatgacacatgcaactgtcaatgaattaggtaatatatctataagaacgataggtaagttaatagatgaaaaagttaaactagaaggtatgtttgaaatggtattacttgctaagatgaatgaagatggtaaatatgttttccaagttcataatatgaataatagtaaatcagttgtaaaaacacctatgggtatgtttgacacagacgaaatagataatgacttagcttatgttattcaaaaaagaaatgaatattacggaatagaagaacctaaaaaagaagcaaaataatacttgcaattttataagatatatgatgtaataaccaggcaaatttagacttggttattacaaaaatagaaataaggagtgatgtgtaatggtagacaaatcaaaattaattggaaaagtggatattgtaggtgtagttcaagggatagaacatcctacaaagaatgaagatggtaaacaagtagaaattaaaactattgtgaatttaatagtagaaaatccagcaacaaagtcaacagtatctttaccattttttactaatgaatgggataaattacaatactttgataatggacaacctcaaagagtatcagaacaaaatgcaacagaggaaatgaaaagaaaagctattaaatatgaaattaaaggacaaaaagaaactaaaacatatttaacagtaaaatcttttgtagatgctttaaaattatttaaaggcaaaaaagtaaaaattgaaggtgtaagtagatatagaatcaataatcaaggatttttgcaacaaactttagagtgtaaaaaagtagaatatatagaccaaaaaactacggattatagactacaaacacatacttatgttcttttatcaaaaaaagaaatagaaactgtggatttagataaagagttggaaatatatgttcctcttggtactcaaaatgaatattacagacaaaaagcaataattccattagaaatatttttagatggcgctttaaaaactgatagacctctagctaaacagatattagatactatgagaaatgattgtgctaaaagttttgaattagagggtcattatctagtacctgctacaatagaattagaaaatggtaaggcatttagagaacctactgaagatgatgtaactcaaggtgttagacttctacatcaagctacaagtaaaggggatatggagctatataaacaaaaaatggctttggaatttaaaaagattggattaattcctgttgagagaggtacaataaatattgctattatagcttttgacaaagtagattatgtagaatacccaagtttacaagactattctactaacaatggagctaatgcaatacaaaatgctacccaaagttcaatgcaaaaggcattagaaactatgaaaaaaataaaggaaaacacagtacaacctactttagcaagtgaagaaacaccaaaagaagatattaaagtagaagtaaaggaagaagttaaacaagagaacaacgtagaggaagttaatgttgaaactcaagggacagagaataaaaaagaggaaataataagtacaactactgaaaatatagacgattcacaatttcctttttagaatcaacaattaaataaagttaattaaaaggtaggtaaagttatttgcctaccttattttactaataaaggtggtgtatattttggctagaaagaaaaaagataaaagtgtagaagaaagaaataaagaaatatatgagaatctattagaatttttaatacaaggtaatagaaaaagtcttaatgcaaagaataaaaaattattaaaagattttgagaatgaagtagaaacttatcaaaaaagaatttattttttatatcaaatacaagatagttatttagaatggaacactttaagtactgatgtaaatgctaattttaatcaattaatatacttaattaacttaaataaagaagatttacatagacaatatattagtccttatgatattgaccctaaatatttaaagacggataaaagtaaaattataataaataaagatgaaaagattataaaagattatacagaacttgaaaaaaaggtagggataatatgagtgtaattgatactaagagagaaataatgcaagtattagaagctagattacttgcaggagtattacaaaatatagataattttaatctattagaagaaaagacaaataaaaatgtaatatttacagtagaggattataagaaattttatgaagtgtgtaagatattatataataaacaaaagtatactaatatagatgagtttgcattatctacatttttaaatacattatccatagatgaaaaaagaaaacaagagtgtatgagtatattttatcttattcaagaactaaataaagatgatataattgattttgagggtgttttagaacaatatacaatagttagtgtacctttaagactttatgataagatagctcgtaatggaggattagaagagtttataggtaaattaactaactttgataatagtgatgatttgactactacaatagagggtatgataagtgaaatttgtagtgtaggaacagctgatagtaactttgtagaaactaatttaacaagtagtattacagagggttttattaaaaatataagaagtggtaagagaatagattgtgtaccttttgatttaagatacagttatttgaataagtggaataaaggaatagtaagaggagtcaacggaattgcaggctggagtggacaaggcaaaagttcaattttaatcactgtttatgtgctttctcttttagaaaattcaaaggataaaatatgtttattttgtaatgaacaagtatatgaaacctttatacagacaataacttttgcttacattactaatgtattagtatttcttaatcaaaatgcaaaaactataagcagagcagaatatggagaaaattgtctatcaaaagaggatatggattactttgtaaatgctatgttacattggaaagaaagatataaagatagaataactcatatctattttgaaactatgcaacctaatatacttagaagagaaataaagaaaaaggtcagacaaggatttagacattttgtttatgatacatttaaggcagatgaagaagagtataaagatattatagaattatctaaagttgcagataatttaactaagagatttaatataacttttactattactttacaaatgtcaggagaatcctacggaacaaaatatttgacatacaagtgtttagcaagagcaaaagcaattaaagaaatattagaaaatttaataatgtttagaaagttagataaagaagagttagtaaatttaatagttatgaaacataatgaggaaacaggaaaagaggaagaagtatcttttagaacagatgtaccttattatgctgtgttctgtgataaaaacagaaatggaagagatggctatgtattactatactatatagatttagacaccttatattatgaagaaataggagttattcaaaatatgccaaaagatatctcaaggaaaaaatcatcttagtgagttgattctatgatactagaagatattgtattacataatcttaacttaaatagagaaatattatatagtcttttaaatagttatgtaggtaaattaactcttagttctgatggtactactcttagatttgatatacatcatagttcaaatgcctatgttctttcactagatgatagtttgaggtattataattttagaaataatgagaaaggtaatattttagatttattaagtaaattagttgatgtagataaaactaaatatatcacagaattatacttaaatttaaaattagagaataaacttattaatgaatgtggagaaatagaagaatgggaagagaattatgtctatcaagtaccagaaatatatgataaagaatgtttagaacaatatccaaaagctatatcagaaatgtttttaaatgatggtatacgagtagaaactcaattattctttaatattagatatgataaaagaactcgtagagtagtcattcctgtgttttacaataatgaattaataggtgctattggtagaagaaatgctatatatttacaagataaagagaataaatatatgccagtgcttaggtatagtaaatctcttgtgttcttcggctatgatgtatattatgatttaattcagaaaacaaaaatagttatgttagttgagagtgaaaaatctgtaatgaaaatgtggcaaatgaaaagcaaaatacctacattagcactaggtagtaatgcactttcaaggaatcatatagagatattaaaattattgcaagtagatacagttatatttgcactggataaatcactagattatacagatagtcttattcctaatattcaaagattaaagaaatatggtagagagtgtaagattaaatatatagatgtaaatagtatacccaataatttattaggagaaaaagaagcaatatgtgatagaaatagggaagaaattacagaaatatttacaaaatatttaaaagatgaaaatttttagaaaatctacttgacaaaagtagatttttttgttataatatgttgaaatacaaaaattgtatttaaaaataaattaataaggagttgataaatactatgagtaacatagtaaagattaaagaatcagaagaaataagtttaaaaagtagattattattagatattgctttagcacctagcgaagaggaaaagaacctcgctatgaaaagatataataattatataaaatatgtagaaaaggagaaaaattaatatgaatgatattattcaaatacaggtaaaagaaaacaaacaattagttagtggtagaaaattacatcaggtgctagagataaatacaaagtatacacaatggatagaaagattaatagaaaaatatgaatttgaagaaaatgtagattttatagtggtttctcaaaaatgggaaagcaatgaagctaaaggttttacagaaagaaaagaccatttatttaccctagatgtagcaaaagagattactatgatacctaataatgacaaaggtaaacaaataagaaaatattttattcaatgtgaaaagtcttggaatacccctgaaatggttttaagtagagctaatgaaatacaaaaaaagatgatagaaaattatcaaattcaagtcaaagagttagaactaaaaatattagaggataagccaaaaatagaatatgtaaacaatgttttaaactctgaaagtctattaactacaactattataagaaaagattttggattgagtgctaaaaaacttaatgaaatattaagtcaaggtaaaattatttataaacaaagtggaacttgggtactatattctaagtatcaagatttaggtttagcacaaacagttactactgaaaagactacaaaagagggagtacaattaacttttcatactcttaaatggacagaaaaaggaaaacaatttatatataattatttaaagaaattaggatataagttagctgttgaggtgtagttatggaacaaacacctcaagtagatttagtaaagaaacataaacaatggtttaaagatttaagtatacacatagataaattcaattttggtatactcaaagatgatttaacaaaattagaacaaatatatatgggaggacttgtaaagagtggttattttactgaaactgtgcaaggttatttactaactctaaaaggacaatctgaattaggagtgaatcagaaacaatcagatagagtaaaggaattaagaactaataaagttaaattatggagttttagtgaattagaacaatggaatggttgtcagctgtcttataagttacaaagaatagatagagtaccacaattacactcttcatattcattctatggctctctagcacacgatatacaagagagttatgtgttaggtaatataagttataaggaaatgatagaacagtttaaaactaggttagaaaggcttaaaacactaggtgtacttttacctaaagatagaaaaggtggattaactattcaagaaaattatgagaaatgtttgaaagactattttagacataattatactgaaattaccaaagatattagagtggaagtagaggtattaaaccaaataggagaacattggatactaggttatatagattatcttaaaataaatagaaaagagaatggaaagttctatctagatattatagattttaagacatctactatatttacaaaagaagaaatgaaaataaaagcaagacaattaatattgtataaaatattattagaaaaatcttatcctaatatagtagtggaaaatatagggtttgattttatgaaatatgttaatatttattttaatagtaaaccctctaggaagtcaagaaaagataattatatagaaccctattatgaaaagttaataaaagaacttggagagagtatggacaaggaaattcagaaatggattagaacaaagactatacctcaagaatatcaatatttaattaatataaaaaattgttatgtgtattattatcctacacaagaggatatagacgaaattactcaatatgtagagaatactacacaagaggttaaaaatggtatagaaaagaatgaatttactaatagagattatgcaaacgaacaatttttttgtgataatttatgtgattttagagagaaatgtcctattataaatcaagctaatataccacaaggaaaatcaatgaatagcatattacaagatattttaaagaaaagaaaagagggaaaatgaaacctactaaacatatagttagcttttcaggaggaaaagatagtacagcaatgcttttaaaaatgatagaaaataatatgcaaatagatgatattatatttttagacactactgtagaatttccagaaatgtataagcacattgacaaagtagaaaattatataggtagacctataacaagattaaaagcagagaaagattttgaatatatgttattacactatgaaaagaaaaagggtaagaataaaggacaaaaaggttactcttttccagacttccgtaatcgttggtgtactcaatattttaaaaaatctgtaataaaaagatatttaaaagaaaaatacaaaggttttgaagttattgaataccacggaattgcagttgacgaagtaaaaagattggagaaaaataaagaaaagaatatcaaatatccacttgcagaatggaatatgacagaaaaagattgtttagaatactgttatgctaagggatttaattggaatggtttatatgaaaaatttgctagattatcctgttggtgctgtcctttacaaagattaggagaattaaaaattctatatggagaataccctaatctatggaataaattaaaatattggcaagaaaatacctatagaaaatttagaagtagatatacagtacaagacttagaagataaatttaaaaaagaaatagaaaaagagagaaacaaatgaaaaaaatagattatactttattagatggacaaacttatcaattagagttcaaaagtggatatggacacagtgtaggaatagatgtggctttggcagaaaatgttgaattacactatggagaatttaaaatatgttctcttgggttcactatgaaagtacctgatgggtataaagcagatttaaaacctagaagttcaacatttaaaacttggggagtattacaagctaactcaatcgggctatttgaacctagttatagttccacactagacaaatgggctattccattgtttagacctttagattataaagctatgcaaagattatctaatggggataaatctttgtcagacgatgttttaattattccaaaaggtactagaataggacaaatagaaatatttaaggcacaagatgaagtagaattaaatttaatgagtaatgaagagtatgcaaagaaacacccaaatgttagagggggatttggtagtacaggagttaaataagaaaggatttatatgaagatatttgaaatttataatattaatttggatgaaacattatatgtacatagtttatatgatttttgtaaatttaatggaataactgaaagattattaagatatacgcatccaaacttaaaagaattacacgataaggataaaaatgtgagatggcaaccttatcataaaggatttaaaatagtaagagaatttaacgataaagatatatataaatctaattatgaggataaaaaagctatatttgtagtggatttaacagaatattatggaatacctagtttatataaaaaaaaggaagaaattaaagaagcaatgaaagaacagcatagacaagcaaatactaatagtagtaaagaaacttacgattttagtgatttaggaactgaaaaacaagaaaatactacggatgagtatttagttaaaaaatatcaagcaagtttaaaaactattcaaaaattaagagatgaaaacaatttattaagaaaatcagcaagagaaacatttagaggagaacaagccttagaggagataaaatccaaattatactcaatggcaaaagatttaagtgcattagattttattgagaattggggaaaagagaaagaatttattgaaaccaaaaataataacatagggattttagtattatcagattggcatataggtaaattagtaaatttagatgaaaataaatttagtgaagatatagcagttcaaagacttaataaactatatgaaagaattagagagcaaatatatacttatgaattaactgaattaagagtagttttattaggggatttcatacatgcacagagtagacctgatatgaaaacacaaggacaatatgtggagattgaaagtggacttaaatgtttttatttaattaagaatttaatagatagactttataatcacttaaataaaatagatattgattgtgtagttggtaatgaaagtagatttgatagtagcaaccctcatactaatttgaatgaagtagcaaagaactcaatagattatatgatttatgagatgttgaatttagcttataaagaaaataaaggaatattagtacattcaacaaataattattttgaaaatttagtgaatattaatggatttaatttacttgctattcacggggataagattaatcataataaattagagagtgaattatctaaattaaaatataagatataccaagacactagaaaacctgtagattatgtagttatgggacatatacacagtgcattaattactgatggttatagtagaaatgctagtttagtaggagcagatgaatatgctataagaggacttaatatacctgaaagttatgtcagtcaattatttggagttttgaatagagatactaaagaattaataatgtttagtttaaaattgaaataatagaggagagtttatatttgcataaagaaaaagaagaaataaaagaagataaggataaagagtatgtagttccagagtcagagataatatttaagaatattaatatgatgctttttgactttgatacttataacgatgactttaaatttacacctaattttctagcaatagagggagattttcaagatttaatagatagaacattagaaaatagattagtatatgtcaatattgattattctagttatggtggggatttaatggtactattagccttatataatagaataaaacaattaaacttgttgaatattcaagtaaatattaatgtagtaggcgatttagcaagttgtggtgtgtttttgatattaatgttagcgaaaaaaaaattatgcacatttacttttaataccttatttgacccagtatatcttgtacacgaggggtatatgaaagtttacacaaaagatttaaaagataatgaaagctatgtttatcaagctaattctaaattaaaagctactaataaaaaaatgttagagttaatacaagaatttgtacctttatctaaaactgaaataggtaagtttaaaaaaggtaaagatattttcttagaacacaaagatatatataaagccttagaagaaagagacttaattcagaaggagtttcctataaaagcagatgtaatagaattttcacaagaaaatatagataaaaaagataaggagtaggtattttatctactctttattttatacttgacaaaataagaattgtatgatataataaattatcttaattttaaaaggaagtgatagaatgagaaaattaatattattaatatgtatactgtgttcatttacttgtttagcaaaagaaaaagaacattttgacataatagttaatcaattatttgaatttgaaggtagaaaattagttaaggcagaagatggatattcaaaatatggcttgacaaaatattatacaaatgatataatagggttgactgaaacaaaagctagaaagattatatatgataaattatatggtaaatatgatttagatagaattaataatctagcaacaaaacattttgtatttgatttcttgtataatacaaatcctaataaaactataaagataattaaaaaagtttgtaaaaattatgatgaggagattaatttagaaaattatactttatctgataaagtaattaatgttttaaataataatccccaagtatttgaagaattaatacaagcaagattaaaatatcttagaggtttaaaaatgtataaaaaatatggtaaaggttgggaaaatagagttgattggtttactataaattattcagagtacattaaggagtatcaaatacaaagatatattaataattttatgtttagtgtaagtgaggtggtaaaatgttcattggaacataaaaataatgaatataacagatgaattacaatcaaaaatagtagatgatattaggtataaattactttctcattttaaagtagataattttagtgtagttattgcttggtttaaagtagaagagttatataaatgtttttattgtgataattcacataatttaagtaatcaaataatagagaataatttagataatattatattgaaattaaaggaaattaattgtatggaaactatggagagtaaataaaaatgacaacagatatgttagagttaggtgtatacaagctatttgaggaaggtaattatcaagcattaataccaagagttcagagaaaatttaaaatacatgagtgtgatatagtagttgtaacaaatgatgactacatttatgagattgagttaaaagtgtctgtgtcggattgcaaaagagatagagaaaaagaacatcaacacaaagatttatataataggttaaaatatcaatattttgctttacctagttcaatagtagatgaatgtatagactttatacctgaacattttggtataatagttattaatgatgaaactcttgaaggttctttcataagaaaagcagaaatgaataaaaagcatagaagaattagtaagggagagttaattaatttattgacaacagggtgcaaaagatactttcaaaaattagataatatatggaaaaaggaagaggataatgatgaagaaacaaaaaaatgaaatattaattgatggaaactttattttagatattttatttttaggaatgataggattatattatataggttatttagaattagattggtattcacttggatactatacagttcatatagtaggattattgtgtttattaaatttaatattaaaaattataaaatttatttataataaattaaaaaagaataaaaggagtgatgtataattatggttaaaatcaatttaaaattaaaagaggttagaaataaaatagattatataggaaaatattttaaaatagaggcagatgaacctactaaagctatagtaagaaaatatataagtaaggtaagttcaaaatatgaaagtgaagaagggtatattaattggaatttaaaagaagatatacttgaagaaaaatcttttacttttgtattttttggaaaaaaagagtggttagaagagttagattatttaaaaaaagaattacaagaatttgcaaataaagaagaaaaattaaaagaaaatgaacatcatattaaacctaataaaaataaatctaatgtgggtagtattctaaaaccaaaagaagaacctaaaaaatatacaggttatacagttaaattagatttaacagatgtagaaaatacttttagaaatttaatagaagaatatactactgaactcaataaacctaagtatacacaagagatagattttgtaaaaatgctagatagtattagagaggcaataaataataaagatgtaacaatagtagactgtatggcttttatatcagacttaaatgattatttaactaatttgatttcaggattttataatgcctagtcaaaatatattaatgtaccttgagttaattcaaaatattcaaggtactaatgataaaaaagcagtattaaaagaatggtatgatataaatagttcacaatgtatcaaagtaatgaattttttatataatcctaatatagttactaatatgtctactaaaaaaattaaaaaagtatttagtgaacctatgttatcgactgatgatattaaaattttagatgataatatattaatggtcattatgatgtacttagtagataactgtacaggaacagatgaaaatataagagtattacaatcttatagagatttatatacttattctcaatcaaaagaatttttagaattgtttatgtgtaaagaattatctattggcttggatataaaggctattaatagtgttattcctaattgtattataaaataaggtaaataaataaaaatatattgaaaagtaggtgaaaaatgtataaagcattaaagatagaattaaaattatcaaaagaacagaaaatacaagtaaataaaactattggagttgcaagatttatatataatgaatatatcaaatataatcaagaacaatatgaactaggaaataaatttgtaagtgcttttactttttctaagtatatcaacaatgtatacctacctagtaatcctgataaaaaatggataaaagatgtatcctctaaatcagtcaaacaagctatgatttatggagaaaaggcttttaaaaatttctttaagggtttaacttcttttccagtttttaaaaagaaaggtaaaagtgaattaggtgcttattttgttaaggataataagaaagattttgagttttataggcataaaataaaaatacctacattgaaatttgtaagagtaaaagaatatggatatatacctaaaaatgctaacattaaaagtggtactataactaaaatagttgatagatacttcctatcacttgttatagaagtagatgatatagttaaaactgaaaataaaagtacaaaaggattaggaatagatttaggtataaagaacacagctatatgttctgatggtagagtatttaaaaacataaataaaactaaaagagtaaaaaagattaaaaagaaacttaaaaaagaacaaagaaagatgtcaaggagtatagaatactcaaagtctaagaaaataaaattaagtgaatgtaaaaattttaataagaaaaagttaaaagtgcaaaaattattttatagactaaattgtattagagatgattataataataagatagtaaatgaaataacaagagccaagttaaaatatattactattgaagatttaaaagtatctaatatgatgaagaatagacatctttcaagagctatacaagaacagaatttttatagcataagaactaaacttataaataaatgtaaagaaagaaatatagaactaaggctagtagatactttctatccaagttccaaaacttgttcttgttgtggtagtattaaaaaaaatttgaagctaagtgatagaatttataagtgttgtaattgtggtatagaaatagatagagattacaatgcaagtataaatcttgaaaaagcaaaaatatataaagtaatagcatagatattttaaaataaaaagaaaaggagaaagctacaaatagcaagttaaaatatctatatgtaccgatggctagtcgggaatttacgactatggagagtacaaggaactatgagtagatacattgtattgaaaatatactcgttgaagtagtaatattctagtgtattaaatatactttaatacatttttagtagcaggtatcttatgattaattttgaaaatccaaaagatagaatgagaatattaatgtatgcacttagatatgcaattagtagaagaagttatgctctatcagatgccaaagaaatattgttagaatatggtaaagattttcagcctcatttattatattctttattagaggatatacaagaagagattaatagatgtggtactgaaaatatgttaggttgcaaaacagaattaattttaatgcaaaatttagtaaaagaattattgttagagaaaggaattaaagaagatgagttttagtgaagatttagtaaaaaattataaaacaagacaaaaatcaataaaagtaatgaaagaagattttaaaaaagtattaggagtgccttttgaattatataaacaaggcataatagatgcttatacaagtggaaaagcaaaatttgatgtaggattaacagaagaacaaaagaaaacagcaagagaattagatgatttattgtgggattataaagatgaaaccctaagagaactcttagaagaaaaagaaatagcagtaatagtagattggttcaatataagagcttggagtgatgaaggggaaatggcttatataactattttcttttcagatgacagtaaaaaagaacaagacaaaaaattaaaagaaaattaaatttttacttgacaaataaaattgaatatgctataatatagcaaagaagataaaacagaagttcacagcaattaaatataattctgattggttgagaaagagataacttctgttttctctttaaatataaatatttttaatttaaagaggagtgatgtaaatgtcaaatttatttatgaaagaattacaaaaatggggaaatttaacagaaacagaaaatggtgcagtagcagtaaagtctacactagatagtgtagtagacttatttggtactataggttctatgagagaaaataattatcataaacctgcaagtgtgaataaggaattattgcctatgtttgctaaagcaatgcaagaaaataaagaattagcaataaaaactttattttatgcaagagattgcagaggtggaatgggagagaaagaagtatttaaaacaattatgttagctcttttaaaaatagaaacagaagaaagttatttattatttaaaaataatatagctaacatagttgagtttggttcttggaaagatttattagatatatttaatagaactaataactcacaagcaaaattagatatagtagattatatctatgatactattcatacagatattagattaatgaatgagtgtaaaactcctagtttattagcaaaatggttacctactataaatagtaaatctaaacatactaaattaaaagctaaaaatttattaactttaatgccaaaattagattttgattatagaaactactgtactcaagctagaaagatgttaaaaatagttgaaagaaatatagcacaaaaaacttttaatgaaattaattatagtgcagtacccagtagatgtatgttatttaatagaaatttatttatagaaaaggataataaacattttaatgaatacttagatagtttacaaaaaggagaaacaaaaatcaattcttctgtgttatttcctagtgatattacagatgcttatttaagtaaaggttttgattggaaaggtttttcttatgaagtagacacagtactggaagaacaatggaaagcattacctaattatatggataagcctttaaatgctatatgtgtagtagatacaagtgcttcaatgtttggagttcctatgaatgtagcgactgcattaggtatttatatagctgaaagaaacccaagtgaaacttatagaaataaatgtttagaattttcacatatagttaagtttatagatttttcaaaagccaaaactttaaatgaaaaaatgtgttgttatacctatcaatgtgctgatacaaatatagaaaaagtatttaattgcattttagagttagcaatagcaaataatttaaaacaagaggatatacctacacatttaattatattatctgatatgcaatttaatagtgcaacaggaaattatactaattctgataggaaatttaaaactcttatggaaaaaattagagataaatataatcaacaaggatataaaattcctcaaataatttattggaatttgaatgtcagacgacttaattttcctgaaattgcaaaagatggagtatgttacgtaagtggatacagccctgctattatgaaagctgtattaaatacagaaatgctaacaccattacaagtggttaagaatgcagtattagtagataggtataaaaatgtatattttggataaataatataaggctagatttattctagcctttaacattaatgtaaaaggagaaagtttgaataatataatacaattaaataatagtaaaaatggaatgataacacaaggtaaaatgtatggtttatacaatgcacttagagttagtggctttcctatgcaaatagaaggtaaagttgaaagtgatatacagttacttaacagaggaataaagttaggtaatactcctgtgggagagggacatgataattttctaaatggaataataatacaatttgatggggatttcactaataaatttacagtagaatttcaaagatatcatcataaagattatatttcatctcaaagtttacaatttactgtagcaaaaagagatgaaacattctttgataaatatacttctaagaaagcaatagaagcatttttagaagcaaaagaaaattatttaaaaaataaaacaaaagaaaattatttaattttacttatgtctactcctaatggaatgaaaataaaagcaggaataacaactaatatgaggcaattaaaaactatgtataaacaaagaagaactcatagattacctgaatggcaagaattttgtgattggtgtttgactattccatatttcaaagaattaacaggaataactgaataatattttaggctctgtaatagtgtttaaaatcattctaaaacatttttgatataataagtcgtctaaaagttttgaaagagtttaaacactaaattataaagcttaataaataataattattctaaataatatttaaaggagagataatatggatactaatttaaaacctagaataagaaatttaagaaataaattgtcaacttataaatatgttcattttacttattatgatatgttttggaatgaaaaaatagtaagttataaacaaaaagatttagatatagttttatgtactacttttttcagaatttatatacattcattaagatttcataataatgtagaacctattgttaatattactaatgttaaattttctaatagacctaatgaaaatataaatagttttaatagcttatataaggatatggtacatattcaatatttgaattatgatggaaaaaatgataagagtaaaaatatagctgtaatttatttgaaaaattatagagttcaacaatttagatttgatttggaagtttggtatagttttaatgaaacaaaagatatgttaaaagccttaaaggataaatctttaagaaaagctattttaaattacacagatgaaaataaaatacctgatgtaattaattatgatgaaataaagcaagataataatgattggaattatttaactaacatattttcattaataaaacctttaaagttaaagaaaaagaatagaagatataaaatgttaggttaaaattcctaacatttttaatttaggtgttgactttatttattttctatgctataattagattataaaagtaaaagggagttgatatatggataaaagttgtagatggtgtgtctattttaataccaaagaaagaaaatgtgataggttagaaagtggatttaagtttgatagagaaaatactgttaaaactataactaatgaggtagaagatgaagtattatcagaattggctaatttagaacaagatatagacttcattttagatgatgtttcaggtataacctctagtcaaatactagaaataggtactttatttgccaattatagagatacaataggcaaaagaattagaaatagagtaaatgaagagttagattgggtagagtatgaaggtataaaaactgttacatacgatgatgagttttattgtaaatattggaggtaatatgagtaataagagaaatagaattgaattaagtaagaaaattagagcagactacagggaaaaatatataaaagatttattagagcatatcaaacaaggtttaataaataaaaataatgcttttaaggagtatgttattgagtgttataataaaggagtatatagatgtactttaagtttagatatagatataaaatttataaatcatattaaattagctgatgatgagtatacttctattaaagatatgttcttagaaaatcaatataaagcatttttagcaacaataaataattttattatagaagaatttaatttagaaggatgtatagattctattagtagtgatataaaaataaatgaagaagatttttctgaagaatttacaagtattaatgaatatttgcatacagaaataatatttaaagattaaaggagtgattaaatgtcagaaaaacaaacattatggcaattaacagaacaaggtagtaaattagaggaaatgattgaaaatagcattaattgggaaacaggagaggttgatgagaattataataaattaactgaccttaaagatgaaattaatgctttggtagtaaataaaggtaaagatttaatctatgtattaagaaagcaggacaactatgcagaagctattgatgaagaaattaaaagacttcaagcattgaaaaaatcttatgctaagaaaaaagaaaatttaagtaattatataaaaatgtgtatgattgctaataatattaaagctattgaaacaccagtaggtaaactttcaatagtaaataatgcagaaagtgtagaaatatatgatgaaagtcttatagataaaaaatttatcaaaacaaaagtagaagaaacaatatctaagacagatataaaaaatgcaattaaaaatggagaggaagtacaaggggctagattagtaagaaatactagactagcaataaaatagagagtagatttactctactctcttttaataagaggtataaatggtatataataaatataagaataaaaagatagaaatagataatattaaatttgacagtgaaatggagtttaaattttatcagaaagcaaaagaatttaatattgaattaggaatgagaaaaacttttatattacaacctagttttatatacaagaataaaaagatactaccaataaagtatgtgtcagactttgacataggaaatttaataatagatataaaaggtatgaaaacaactgaatttaagttaaaagaaaaaatatttaagtatcaatatggcaaggagtatgaattagtatgtatttgttcttgtcctaaaaaatacttagataaattagataataatattatatgggaaaaattagaatatatagagttagataaattacaaaaatggagaaaggaggcaaagaaaagatgactaatgaacaatgggcttactttatttttaacactaatgcaatagaaggtaatcaaataatagaaagtgaggtgttaaaactaaaaaagatagcagataaattacctcttgaatattctaaagaagtacatactcaaataataagtaatttcagcaaagataaacaattaagagagtggataacagaaacactaaatgcttggttatgttgtagatatatttatgatacttttgacaatcctataacggagaattatgttaaattcattcataaaatagcaagacaacatacaatagatgaagaaagaggttataatattggagagtataaagctattggtaacataattgcaaatagacagacaacagagcctaagaatgtaaaaaaatctatggctatcataatgtcgcattttaacaaattagagtataaaacaagagatagtataatgaagtttcataaatcttttgagaaaatacatccctttcaagatggaaatggtagagtaggtagatatttgatggtaaagcaatgttttgatgccgatatagagcctataatccctactttaaaagagagaaaattttattatcaactatttagtgatgaatgcgatttaaaatatacgacatcttatgcaatgtatactcaatctctaatagatatagaaaaaacaaatgaagaaagaggaatattaagagaggacttatatcaacagtataatagacttgatttaaaaatattgaataaagaatttgatacaagagattttttgttaagagatgtagaacaaggtagaataaaaaggaagagtgataaatatgttaaacctcgttaatttctttatatatggaatgtgtatatttgtattaataggattatattttataggagggttagactaatgactaagagtttaatattagaaagaatatttataggttttataataggaataattataagtatatgcttagtaggtatttatataaagttaattgaacctataataataaattttgcttggaaaaaagttataaaaaataaagaaaagttatctacaaaagaacaaaaaattataaaatatattcaattattttccttttggaatataaataaatatagctatataacaaataaagatactttgcataagaattatgattatttatgtgaacatacaagtgaaaatattaagaatacatttaatcaaatattagatacattagatagtatgaaaaatagtgatattagaaatgatgttatgctaacttttgaggaattatatgatatagaagatttatctaaattagaaagcttagatgagtatttacaaaataaaattgattatttaacagattttgaaaatgaattagaagaacaacaagagatttcaagagagaaagaaattataaataatcttaaagataaattaattaaattaaatcaatctaaactttattctattataaattcttattataaaagtgatataatagatttgtcagatataaataaattaatagaaataattacaaaagatacaaaggatttagagttaagaagttatataaattcaataatattgagtaaaggcggtagatataatgattaaagcaaagaaaaggacagataaagtatatcatttaggaatacaacaatgtaatttagatgtggcaaaattacaattaaaacttaaagaggaagcaaaagatataggagatgccacagaatataatcaagtagttcaaggggtattaataaactatgtagaaatacttaaagatggctatttattctatgtaagttatagaggtaaaagttatatttacactgtacctgatattaaattaacagctaatattactttgaaatttaaaaagaaaatagaccaaatgttagaggctaagaaaaatgaaagaaaaagataaaattaaagtaatatgtttttgctctaaaagtggggtaggcaaaagtacaattattgagagttttagagataataataaatttcatgaggtaatatctaatactacccgtctacctcgtaatgaatttgataaaaccactcataattttaaagctatgaaagattatagggaagatttagaaaataataatgtaattgctagttataaagctcctcaaggttattataattgggtagactatacttgttttgatgaaaataaaatcaatctatttgctattgatatttgggcttgtattagattattaaataactcaaaatttaatataaaagtagtttatttgacttgtaacgaagtagatagattaattagattacgaaatagaggtagtgatgtagaacattatagaaatgaacctcacctagatttagatatatatgcttattctaaataccaagataaaatttctattatagatactactaaaagaaagataaaagatattaaagaagaaattataactaaaactctattagactttgaaaactttgaagtgttacaaataaataataattttataattcaaaggatagacagtaaggatttgatactaaataatagtgtatatgaatctaatttagaaaaaatattgaattatatccttgaagattataattatattggttttataaaattagatacacatacagagttgtatattgaatataaaggtaagaattacacttattacgatttcactcttgacagagcaacacttttagattataatagattgattgaaactctattaaaatggaagtgtggtgtaaattatgatagaaattaatgcaagtaatacaaaaggacttataggtaagtaccttgctacttataataatattaaatgttttaaaggagatgtttatgactatgctaaatggtataaagactttatagcaaacatagataatcccaatttagtgttagcttttgacattgaagctagaaaattatatcctagaaataataatataactcattttgccttgagttataaacataatgatatttattataattattgttttgtagtcaaagatttagacaaggatttaaaagcaagagtatttaattcattaaataagtttaaatgtaaaatattattacataatgcttattatgatattggcactattaaatttttacataatgtagatgttaagtgggactttgacacttatattctctttcatactctaatgtctcatagagcaaaagatgatagtgaggattttagtgatagtgaagaagatagagggttaggattaaaagattttacaagagattatttaccttatggaaattatgaggaagagcttgaaaaagaaaagaaaaaaatatgtaaagaattaggcatatctgtaaaacaatttacttatgatttgttttctgacgagattatagcaccctataactgttttgatactttatgtacattacaagcctttgagataggtttggacttgtttaaagcctatgtaaaggacttaggattgaataaattggcacaaataataaaaacaaaaaaagcaacaatggatatttatataaaggctttttgtagaggggttaagatagactatgacaaagttgaacaattaggtatacaattcaaagaaacaaaggatagaactgaaagagattttttaaatgcttttaggactgaaatagaatggtgtgagagattacatagagttaaagaatatgataagataataaatgaaagtatggtagattatctttctcatacagcacaaaaaggaagtaaaaaaggaaaaacaaaaaaagaagaggatggaaaacattattataccaaaggaatagaattaactcctattcaaagtagaaatttgttaaagaaaactgaatttagtatgacttccacagataaaaagacaactttatttgtagaggttatgggattgaagcctgatgataaaggtacatcaaggtatgaacctattatacttggagaaaaagaagatatatttaataaatgttttggttataaattaaatgatactactggaaaaagagaaagagtattaatgacacctaaaacagatagaaaatacttagaacaatatgttaatcaatatcctcatatacaagatttattagattttggtaagtgtaagactgcattgaataactttttaggtgtagaaaagacagaagaagataaaaagacagtagatggtactactttggcagaattaacagataaaggacaatttccttatgtataccctagttataatatattaggaacaattacaaatagatgtacttgtaatactcctaatctacaacagatacctgcaaggggagtattagcacctttgaaagaatgttttagtgcaagagaaggacataagttttactatgcagattattcaagtgctgaaatagttatattaactgctatcataaatagtaggagatttaatgaggctattgaaaaaggttgggatttacatagtatgaatgtttggtttatgcttaaagataaagtattggcacgagctcctgaattagagaatatgtggaatgagtgtaaaactgatgatgattataaaaatttctatgggacaattaaagataaatttgagaaaactcttagataccaatgtaagtcgctaaataagttggtgactataaacctatctcatatcggtggaactctaagtctataaatatagatatgacaataccgagctaaaactcaatagtaatattgaatgacggtgtaacgagttcctatatttgcctattaggtaaatataggagataatccttaacaataggattataaatggtaggaacttttaataaaaagttaaggtgtactctaaacccactacaagagtagtataaatagtatgaaaatacgggtagtttttgaacgtttagcttagcttatggagctggggaacaaggtgtagcaaagaacattggtatttctgtagatgaagcaaaagaattgattgaagcttatatgagagctaaccctgaaatgaaaaagtattttgagaatcaacacaaaaaagcaaaagaacaaggttttatcactaatccttttggagcatttcttatgatgcctgatgtacctaatgaggataaaaaacctgactataatactaagaaaaagattgaaaagcaaaagaaaaaagcacttaactttcctattcaatctagtaatgcctttttactttatgaaggacttataaaagcagataaaatgattaaaggaaaaggtttagaggataaaatgcactttatgtttagtgtatatgatagtttttgttacgaagtatcagatgaagtacctcaagaagaagtattagatatattagaaaagagttttatttgctatcttaatgatgattatttaggtatagatatagaaattggtacttcttggggtaatacggaacatattaaaagacctaaaagaacaaaggaagaagtacaagtatatgatttcagagaattttaaaaggataattaaatttatccttttttatttaaaattttattgacattatgattatttgatggtataataaattatcaaaatttaaaggagatgagatatatgcaacaaatttcattaaaagtgttagaagagatgttacaaagagaattactaaaaaatgaaaaaggaggaaatgatgctttaaattattatttagatttatctgattggaagtatggggtattaaaattagataagataactacaagaaaagataggtatgataatagatatacttttgtattaaaaggtataactccacacgggatacaaatagaagtaaaagattataatgtttctgggttaataagtaaactatactctgaaaataaagacttattagaaaataataataatatcttaaataaactaatttatttaactacagttagagatgcaaaacatattttatttttatataataattattttacaaaatcagaaaagtcagttaaattagaaataatgtattttttagtaaatgatagtaaaccaagaattagtcttattctattatataactataaaggaacaaaaagatatatggaattaaacaatatatatgatttagcaactgaaatagacaatgaaattgaaaggataggtagataaaatgaatagaataactttaattatgattaatttattactttttgcaagtataatatctaatatattcttatgggcaaaagtgaattggctaactaaaaaactaaaagatagagggttattataatgaaagaacctataaaatacttactaaaagataatcagagtgtagactatatactagatgagttacaaattacccaaagtgtagtatataaactagaagataaagataaaatacttagatttattaagatgttaaaagctaattacaaaaagaaagcaaagaaaactacaaacataactgaaccaaaagactatgtctatattaacaacaactctattggttggacagatacttataaactaatataccaaaagctagacttaatagatgaaactaagtctataaacttgaaatattatataaacatagactttctctctgaaattaagctagataagtctactaagtttgtaggtatattggtaacagacacttatgtagtggttatctctaatacatattgtattatttgtgagaaagaacatgaacctatggaattacctattgatactctgttacaatctagtaaggcttttacagacactcaaacactaggaataactactaagtcattaactggtttcaaagagcttaaaactatatcacaagcctttaaatcagacataatagatttatatagagtaacaaatgtacctaactcattttatcttactcttaactatgataatttagttgcttatatgtctattcagaatcattcagaagatagacatattaagatagaccattctattataagagtagcttttggtacagacagtctagttaatatagataatattaatcctagtctagtggcacattatgatatgaatattcttgaggggatattaaatagtttgattggcaaaacattaacattaagaattgcaaatgctagtatgacttctcaattagtgtttgatttagatgactttatgatattgttaatgccttgcaaataagaaattacatagataaacataaatataaagagaggtaacactctcttttcttttattgtaatttatgcttgacaagagtatcaaagtgtgatataataatagcagactaaaataatatatatatatatataatgaatttttgaacataaggtaaaatgtatgatacagaaataaaactacttttttaaaaattaaagcaattttatgtataaaaagttgtttaataccaatgaaaaaagcaattccttatatattatatatgttgtgtattttgtttcatagaataagaaactggtgtagagtaggaggtataaaaatgagtaaattaaattttgaaaatatcaatcaagaggatatgaaaatacaaagtagaataggaggaattatatgcaaataaaccaaacaaaagtaaattatattaaaaattcttttcagaaattaaaagacttaatgaaaagtgatataattaaagagtacaaattcagaataataatagataatgaacaacaaatagagtatttattaaaagaccatatagatatcaaacctttggatgatggttatgtagagtatgatgaacctctatatataactatgtcttttgactattttattaactatttcaatagtattacacctaaacaggtgcaagatttagattttactgtgtataaaagtaaagagattgatgtatataactttcctatatctaattgggatatagatgagtattataaactctttgataaaaacattgagttaagtttacaacctttaatagaacacttaggaacagcatcttttggtattatactcaataagttttataatatggcaattttaggctatcaaactccaaatcataaattagatgaagatgatagtttttatggggatttataaacttacgcaaatcaggttatattttttggctaagtatgtttatttttctttggtatataaagataaaatatgttttttcttttagagtatatatatatatattggcttaaaaatatttatatagaggagaggacagattgagtaaaataacagttatagatgcaatgatggggagaggtaaaactcaatatgcaataaatagagcaataagagattcttttgtgaaggataaatttgtatatattactccatatttagatgaagttgatagattaaaagaaatatgtgagaataacggggtcaaagtgtggataccaacaactaaaaatttaaagggttcaaaattagaatctataaaacaagcattacaaaataatgtaagtgtaattgctactcacgaattatttagtagattagataaagaatgcttggaatatttgaataatcataattatacattgtatttagatgaggtacatgaagttgtaaaggtgtatgaggatatgtctagttgtgattttaaattgctattaaatgataaagtaataaaaatagatgaaattacgggtagggttaattgagttaaagaggatttgtatatagggagatttaacgattttaagatattatgtgagctaggtgtaatttattctttaggaaattccataattatatggacatttccaatagaaatatttaattcttttaatgaaatatttataatgacatatctctttgaagcacaattacaagcgagttactataagatgtataatattaaatataagtacagcagtatttttggtgctaatggtaaatatgttttaacctcttttaataaaactcaatatatagaagatataaaacattatagaaaattaatcaatttatacataggtaaattaaattatgaagaggaagataaaataagtttgacatcttattggtttaaaaacaagtgtacaatagataatttattagagttaggaaatagattatataattatgtcagaaatattgtaaaaagttcagataaagtagtaatgtggacttccttagaagaatttagaaaggagtttcattgtaaaagatatgaaagaaaatttatacccttaaatacacgagctactaataaatatatcaaaaagaaatgtttagtttatttatataatagacatattaatcccataatttctaattattttctgaagagaggagttattataaatgaaaatgcttatgctttatcagagttgttacagtggatattcagaagtgctataagaaatggagagcaaatagacttatatttacctagtagtagaatgcgaagtatcttaaataattggagaagttatgcagagaaattagtagaacagattgaagaaataaataaaaattatagtaaagactgaaattaatcagtcttttctttttataaaatattgcttgacatcttttaagttatatgctataataggttatcaaatgataaaggaggtaaatatgataaatgaagattatttagttggaatgaatttattaaatgttgctattcaatttcaattacaaatagcaagagtgagagatatattatgtccttgttataatgaattgacagaagaacaacaaaataaatttgacaaggaaataatagcaatacaagaaaaatatgatagattatatgaacaaaagagagaagaagagtatcaaaaatggagtgaacattatgatagattattaaaagaaaaatataaaggagttgatactaatgactaatgaacaacatgcactatatgaaaagttatgtagagaagattggtatgaggatttaacagatgcacaaaaatttaattttagtgaaacattttgggcttattcctgtgctaaaaatataggattagaagaattagaaacagaaataagaaaatggttaaaggaggctgactatgcttaatgaacatccattaaaaattagagttaatactctaaatgatatgtttaaacaaataaacatattaggtaatgcagaaatgagtaaacataatcatctaatagatttaaaatatgataatcctgtttggtggtatgaaggtgataccgaccacaatataagagtaaataaaagattgggggtattctatagtgaacctaataaattattagaaatttatgtatatgtatctatgcttggggaagtaataatacaaagtttatatagaaaagatgttagatatgattataaatgtgagtatagtcatctaggtaaattctttaccaaaaaacaaacgaatgaattaaaaaactatatgatagaacactatgataaaaatgaactaggagattatgcagtgacagaactaggagaatataaaggagaattaatatgagtgaaaaaatattgaaacaagtaggttggatattgaaaaaagagaaggataaatatttaaaggaaatttataataaaacgaattgttttacaaaatggtgggattatgaaaattgtgaattttctactaaaagaaaattgttagtagatgggagattacatacaataatttgtggaatagatgatataataatttatttttgtataagaaaaaaaggtaaaatattaatgtggggtagtcaaaatgatgtagttcaacctgtgatagcagtagaaaagaaattaacacaagaacaatttgatgtacttaaaaaagctattattgaaaaggaattagaacacaaattatatatacaagatatattattcttataaggaggtagagatgaaacacgaattaatattagttaaaagaaaattaaatagtatagtagaggatatactttctgtttatggtttgaaacaaaaaggtaaatggatatacgcacctacaaatattaatacttattatgatttaatagtaaatagtagattaggaagattcacttataaattacataatagtgagggtaaaattcatatttaccttacaaaagaaaataatataattatagaggataaagtacaaatatcctctttgcaattaccaaagaaagtagatacattaacaaaagatgagtttatatactttaaagagtttatattgcaaaatataagtactactaatatagatgactttttaaataaggaaacagagatagaattacaagctatttatggtagtaaatgtagtcaatatactataaataatattcaaatactggaacaagcattattaaataatcaaataactatttatgatatgaaagatttttatgaaaaatgttatcaagtaagagattttgaaaataaggaagttcagtggacttttagattaaaattagatgatggtaaagaaaatttactcaaaactacatatatagatgtatttttcataggtaaaacatcaaaaagaatagttgtagtatataaagatttagtattagataaaaggtacactttaaatattgaggtaagtaactttgtagaaagtttaagcaaacagtggaaggagatatatgaattataagagaaatataaaatgtatagaacagattacaaaatctgaagaaataaacttgtttgctaagatacccattatatgttctttattaaaagaaattagagaatactctgaaaaagatattactattgattataataatttatttcaagatttattgcaattaaaaaatagtatagaagatgaggatattcaagagttaattttagtatatgctaataatattagattgttaattaaagaagaggaagaggactgggataatttattaaaggatagtgaggattagtgagaattatacaattaatacaagaatatatacctaataaaaatataaaatatatagctttatgtgtaattctatgctttgttatatggttattaaagagagataaatagaaggattaatggaaaaagaaaaggtattagagatagaatttaaagaagtttgggataataaatgggcttggaaaataattaaaaacgaagtagattttaaaaatacagagggagaaatatcatttaataatataaaactcacttattcaattaagtatgatttgtatatttttggtagttattttttaaaatgggaattattaaacagtgataatttaatagattttgatttaaaaacagatatacaagattttgttaattatgttaataaaaaatatggaatacctaaaagatggagagcaaataaaaatgatagttattttattgtaactaattttggagatatagtaaaattaacagaaaaatataaacaacaggatactctcttttatactctaggaaattattttaaaactaaagaattagctactaaatttagggatactatatggaaagatgcttttaataaagcaaaagaatttaatacatattaaatttgatttacaacaaagaataaaaagatatatataaaatagactaccttgtaataacaaggtagattttattataaaggagatgtaaaattgcaaaaacctaatttattagaggataaacctactataaatgctgatgaaaatgtgtggggtatcaaattaaataaaataatagataaacttcaaacatttgtaaatagtgtagtagacactttaagtggaaagttagataaaggtgatgtgtcttctaattatgatacagcagaaaaaatagaaaaggaaataaaaaataaagtaaatcaagaagatttcgacagaaatgtatcagaaatagaggataaacaaagagaagtagataattttattcaaacttttcaaaacaagaattatgtgtattataaaagtaaagaattatgtgataatcagggtaaaattacagatttaagtatagggaatttaattgtaaattctatcaatggtaatagcgctagtggtggattatcagaagaacaagtaaaagctatatgtagtaaatattatgagcctaagtttgataaaaaaagtggttggaatttagatataagttcagatactaactctaatgctgataatgttattgcaagtactaaattagtatataatattgctcaaaataatattaataaagattatttaagtaaaattccacaacaattaagtattgatgggcatattcttaaatataaagtagagcaaggtggtagatttatagacaaagagttaaatttacctaaaagtgttacaaaagaatgggcaaacaataagtttgaacctaaaatagaagaaaagaagacaggatttaacaaagaaaaatcggatgattatgagatgggggacagtaatgttttagctagtactaaagccacagagaatttatcaaaggacttagataaagttgtcaaagatataagtatagatgggaataagttaaagtataaagagggtcttataggactaaataaagaattagagttacctagtgggggaggaggtagtgcagtatttccacctaatactgttttaaatgaaaataatggggatttaaaaactaagagtggagttcctattaagaatataaacttaactcacttgaacggtaaatctttagaagaaagtaaaaaaaatagaaaattttattttgattatttaaaaagaaaacaaggagtaccaccaaaacaaacagattttaaatatgcttattttctagatacttatacaaataaaatcttatttatagatgatttattatcaagtgaggattttgatgataaaagtttagagggtttaatttgtaattataattataataataatatgaaaagatatatatatttagattatagtgcttcagggtacacaattataagcaagaatacagaagaatataacatattagaaagttgggaactagaagctaataaactgtatcttagtacttggtattatagtataaactcggtcaagtatcctgcttattatttttatgacttaactaaaagtattatacggtctgagggaacactaggtataactctataccctaatatacaaaataatcctcatgtttatccagaaaatgttcctgtattgtttatgaaattaaaagatgcttactatgttttagacttatgcaatcctattaattttaatgaaaaaataatagatagtaagaaagaaacttataaatttttttggtatgttaaagaatttattaaaactaatctaggtagtagtgaagtaagacaattagtagattataaagccataaaatcctctgtatttaatactgctaaaaaagatttgaatcttattcctactttagagtttgaagatacttcaggtaaacttaatatttttggtagttcttcttgggatgaagtttcttattataaaaataaacatattaattatttttataagatagatttaaaagatacttcaaatactatttatggatttgtttctctaaataatattaaaagttatatatctacggaaaatgattcttcttatccttttgctgttttttttggagataatattttttataatagaagaattaaagagatatggagtagaggtttttatttagattcaaaatattatttacctaattatagtctttatgctttctattcaggtaataagtatacttataaagaaatagttaataatactatagttactgcaaatatatctaatttagatagtaaaaacgtattggaagaaaaatatgtatctaatgatgattcaaattcaagagtttggatgtctatacttaattgttctaattcgagtttaataaatttatcttcaaatacacaaataaaaattaataacttaaatataagttttatattttttttaatgagagttaaattacaaaataattataaaattttagaattggctaatagtatgttaccctttgatgttacacttacacataaaaatattgattatagattttttattatacctgaaataccttatgttaatatatataatattgaaagtataactccaagatacataataggtttaaaagttaataatactatatatagatttataacagaatttaccccaaaatttctatataatatacctgagtttaaacatattaagaatatgtttgatgaaattattagtttagattatgaatctaatgccaattttgaagattattggtatagttatcaagatactttattttcttggaaaaataatttatataataaatatagttttaaaattttaaattatattagagataaaaataatgtttctaattatgttgaatggtcaggaggttctcttagaaattatttacaaggaaaattagaaacagtaaaaataacaaatgtaaaattaagtgtaaatgaaactttattagatacaaattatcttaaacaatatgaagaaaaagacgaatattggttaaatattataaatagagtattaaatacgaatagaaatattataatagatgctgaaggaaattaaggagtaaagtatgggtaattggtatgacataatgacatttaaaagagggagaacacattatatagctaatagcagtaactataatatagatatacaaaatactttaggtaatggagttccttttaacaacccaaaagctatagtaggtagtaatggatttgtttttaatacggaaagtaaactgtataataaacattctataagtggacaaactttaaatatacaaagatttagaactccaatgatagttcataatgaaaccttagcagtacaatgggtatattccgtaggacatactacaattactatacctagagaatggagcatatctgttgaaaaagtaaaaatgttaatcttagacttaaatgttgtaactggaagatatgcacctagtacaggtataggtttacctgatttttttgaacctgatgtaaatatatttcaaaataagggtatagtaaagacctatacatcaagaggacaatgggattggtattcttctaatcctacatataatgtatataaatctggggatattgcttacgaagaaactcgaagtgctaggtatataatagaaacaagtggagatttatatgggaatacatataaaatagctataggacctttagaattaaatagtttaataggacaaggaagagatactttgttaaaattatattcttgtacttattttatgaatttattcgtttatattacactttactatgaggattatgacaaagacttaggttcaacttctactgcctatgtttttgaaggttaaagggggtcaaactaatgcctaattattatggatattggtatacaataaaagcatttaagcaaatagatataatagaagtatctgtaaatactaatttcaagttatctgaggtaagtagatataagcaatggataaatcctacatttatacctacatttagctattataaaggtgtatactctagtcaaacagctagtttaagtgtacaatacatagatacagaaaaacaaatatatagagtacaaagtttagatgctgataatggaagtagagcttatgtattagttgtagaagatgatttatctctaaatgactatgaccgtccacctgttaataaaaccactacttatagtggaagttgggaaactcaatatgtattaaatgctatggaagtatattatgtaaatagtagtaatgattttactttaattcttccaaaagatacaaataatgttaaattttttcctgtgtttgactatatgactgcacctttaggtttaagagagtatacctttagtatacaaaaagtaaataacaggtcttggaaaatattaccttattttagatatagttataaaactgatttttatagatttataaattcttgtaattttacggtatataatgcaagtctaataagattaactacaaatacattttatagaaaatatttaagaaataatgataattccccttttggtggctcaacagtaagctataatatagcaggacaaggtggaagttataatgtatatgctaatcctagcgattgggaaaacagttatatgtatcaacatccatctttaggtactttatggcatcctttagaatatcaaactttaccttacacaaattctatattagtaagaactaatgagatgcgaaatacagcttttaatgtaaatgtttctactgcattgggtaagaatgctacacagaatgaaattgtagtaagtgttactagactaggggatagtttagtaccctatactaattgtggattaaaagtatttgtaatatatgaataatcccccaataacccaacacaaaaaggaggtatacccaatatgagattactaatcatattaatcttagttatcatattactattatcatattttagaacaccaataaagaataagatagtagaaatatataacaagacaaaagcaaagataaagaaataaggagagaagagagatgtaaatacatctctttttttcatatagtataaaaatactaatatttactgaattctatttgacccgctgagagcttgtttaacgagtttaaaacaagtgaggtatataattatatgtctaacattttagagacacattaaaagctatctaatcacttcatttttatattggtatataaagagaaagtaggtatcaaaaagataccaatggtataattatgagtagagtaggataagaggaaaattaataaataagtattggcataataaaatagatatgatataataagatatcaaatataaaggagaggataaaatgaaaaatttatatgaggaattagataatattttagaagaaaataatcgtatgttagatgatatttgttttgtaactttggatgaaataggaataaatagaaagacattttatgaaaaggctaaagagtgtaattataaacatacaactgaaataaatcctagcttaaaaatagttggaagggattttgttcttgtatgggataagaatactggatttagatttgtatttttagattatcctgaagaaagaaataatcatagggatttaaaaataaattaaaaggagagtgaaattatgaaatacaaatattttacaaaagaatatgaaacaatatcagatattaagaaacattttagagaattatcaaagaaataccaccctgataaaggaggtacagatgaacaatttagagagttatataatgagtatgaatatcttatcaaacactttgtagagaaagaatatagagatgttagaatgtctgaaatggtaaaggcattaatagatgagttaatgtactatgaggatatggaattagaagtagtaggagattggctatgggtagatacaagtagagataatgataagttacttaaagatttaggtttcttttggagtagtaaacatagtaaatattattatagtggaagtacaaagaaagtaactaaatgtagtagttattcaatgtaagatatgagaaatatgatggggaataaaagaatagataagaaaaaggaagaaagattagcaatagggtaaggagatgatactatgaacagaccaataaataaaatatttaccaaagttaaagctgaaatgtataagaaattagatgagttaagacaagagtatgagcatacagtagatgaacacataactttaaatgtattagattttgatgatttacatagtgtaaatagaaatgattatgcagattatgacttaggatacatttatattagtaattattttaaagttaaattaattattcaatctacaagtttaaatattggtattaaggtagagttaaatactaaatatatgaaaggtacttggagagaatatgcctatgatatagtggatattagtaaagaagaatataataaaatatatgcagaaatacaattaaaagaagctaaacaagtaaataaagaggaattaagaaaagaactgggtatatttggattattcagtagactatttaataaataaggagagtgataatatgagtaaatataaagtaggatttttagtaaatagtaatgcaaatgctttcagtacaacagcagaagttatagatttagttaatgattgtggttattcagaagaagaagcaaaagaaattatagaagatgaaaataaactagatgttttatttaaagaatggttatgggatactatagaaaccagttataaggtattagaaacagaggaagatataaaagagtggaaaggtctaaatgattagagagggtaagatatgagaaatataaaaataataaacattatagatgattttagttttgaggaaataataaatccagtaagagtagaaaatagtaattatatgttattattagacattcaaggagagagaaatactaaaactatactattgaatgaacttaagtataaaataactatgaatgacgaggatatagtattattagaaggtaagaagaatatgtcaacagtaaatactatgaacttaatatatactgttttattagagttcaaattaggtaaatataatggaggaaacacacctcaaaataagaatttattaatagtgataaatgaacctaatgcaagtgtagatattagtataagagagtggttataaaatacaaataagattatatgaaagagagaataaatatgtaataaaatagaaagaaaagtatttagattgaagaaatgaatgttacttttaatattatttttaattttaattttggcagtaacagatgagtaaaataaatataattagtaggaggtatttatgaaaaagataacattacaaacacaaaaggtatttaatggaaaatatgcttttacactagaagtaaattttgatagtgtagaacaagaggaagatataatatattatgttaaaacagataaatatgctgtatataattttaataatagttggtatatcttagataaaacaactcatattaaatatttagaaagtcaattattgaataaaatacaattaaaagaattaacaaatttgattaaacaaattaataaggaattaaattataatagagtaaaaggacaagaatattactatatagattctgacctaacaataaaaaagagtacagaaatgttttatagtatagataataattcttacaaattaggtaattattttatagataagaaaaaagcagaagaaatagcacttaaattaaaagaattttggaagggtgtcaaagaagaagagaaagaaaataattatatatttagattaagttcaaatataaaacaaataaataatatatcatataatattcaaggtaaattgttagataagatattgaagatatgtagaatagcagataaaagattaatagaatttattatatataaaggatgtataaaccaagagaaaggtgtagaaattaagtttagtcaaaaaatagaactaaaaggtattaaagatatagaatatgtagatataggagaaaattatgtttatgcttgggtatctactctaagtaaatatcagttattaaatatataagaaaggagtaattatgattaaaaagataagattagtagtaagtgatagagttcataatgaggatatgtctattcttgcagaaagacatcaaaaaacaataaatacttatttatcagtatatccaaatagctatgtaattagtaataatattactgaaaattgtattgtaactatgttggaatatgagattaaatcttatgatttatttttgtataataaaaagatagtaaaaatatcagaacaggactcgttacaatatccttatttagaatatatacatagtgacagtataactgcatatattaaagagatgaaagagatagtagatataactacaagacttgtagttgaaggtcaaactagaagtttatacactacaatatattataaataaaataaaaaaaaggaatatgaaaaaataacttgacatatttcttttttaatgctataataggttataaagttagagaactacaactctcttaggtactttataagaacattggaaagagtgaatatccgatttatcttgtagacaattaggagctaccatacaatcagagtagaatatgagtaataggaaactattgagagttatacagaatgagagtatgaaagagatagcatatatttgagtgataacgaaaataagagtacagaaactgaacaaaatgtaggaaatatagacaaaaatagtgaaaggggaatatggaaatgagtaaaatgagaggaagatatatgaaagaggagaaaatagtggaggatattttatatgtgtgtataataagaggggtcagcaggtcgaggcgaggactccctcccaataattcattactagagttaagactattatcctctccctaatatttattactttccacctatattttattctctataccaatacttatcctttctgtaacttaatcacatttcttttccatatctttatcaactttgtaattattacaaatattactattatttcattggtactattgactttcactctcgttcaagtgtaccttaatattagtttgtgttttgcaaacttttataaataatatttgtattaaccaaacacaataaataatctttgattttcactgatgttaaaatgctatttttgtatattattaagttaattatgagtaataaggtacactatattaaaatacttaattttgtactctataataggaaaattttgatatttttctcttatgtaaagagtttcttgacaagataagaattgtatgatatagttaaataaaaaagagatgatattatgaaatatacagtttatgaagataataagagatatattcaattaagagaggatataaaaataaccttataaacacttataaaatagcactcaataactagccatttctagcctatttcagagtgctatttttcttttacataccaatacaaaataaattattgtacaaataataaaatattcacttgacaatatctaactaatatgttataatgaattatgaaaataaaaattaatgtacaaaggagtgatattatgaaaaataaaatagtaaaaccttgtgaaccaaagttagaatgtatgaccctagataagtgggaagcattacaagaagaattaaaaatgtggagttatgacttagacacttggcaagatgatattgtatgtagtgtacccactgaatatgaggttatattagaacacaaacaaaaagatgtatgggtattacaagaaaatagatataagtatgatgatgaggacgagtggtacttggaaattcttgtagatattgatactgaaaatgaatgtgtatatgtttatgaagcctatttaaaacaagtaagaaaataaaggaggtaaagtgtcagtaaattataacttaaaaactcaaataaagataaacttgggaaagcacacttataaatttgatattgaccttatgaagtataataacctgttaaaaatattagattttatagatgaagaaggtcaagaggtatatttacataatatatcacagaaaacaatgcaaacatatctaagaactttagaattattgcataaacagaatattcaagtatattttccatctagatatgacttagaattaaaggatatgaaaattgagttacacttttctaagtattatgaaatagaagatacagtatattatagagctattgctttcttagaagatacaatttatgttttggttaaagccaatttaataaaaattaatatatctgaattaaaagaagacatagattttatgcaattagtagaagataaatattataaaaggggatgatattatgctagaaacaacaatattcttaaattttaatagagggagattaagaatacctaaacaacaatgtattatacatacaaaaggagaagaattaaaatctattaaaatttataaacagtatttagttactgaccaccaaacaaagaataccaatatgaagaagagtaagattattaaaggtagactgcaatcagtagatatagttatatatgatgataaacagcatacatctatatctgctacatataaaccaaaagaattaataattaataaacaaaatgtattacaagtagtagaggataaacctacattagcttattacacatttaaagattttgcttttgaggttgtagactttaataataatccattaatattagttaagaatatgaagtcttttgaaccttataaggacaaagtaaacataccttataaagagttaaaaaagactactaaaaagagaatatgatagaagtaaaaggattagacttaaactttattctgttaaacagtaaacattctaggaaaagaaagtatagagcattatattatgcacctatatataaggtatatcttgaacctactaagaatgtatatcattttctattgatgaatggaaagctattagtagtatctgagacacatatattaataactttttataatcttaatcagaagaaaatagagaataaatatgtattgacagaggaagaaagacaatctaaaagatatatagaattaataactaatattaataaattatatggtagaaaatcagaaaaaaggtaatatataaatatgagagtgtctacttttgacactcttttgttatctaaggaggaatatatgtatgaaatagcaatatatacactagaacaaccaagcgaaaaagaaaacttaataataataggtaaaagacatctagtacctgatattgaatgttatttgtctttatggcaaacagatacatttaatatagagaaattagacaatgataccaatattgttagatatattatattaacaaaaggagaaacaaatgcaaatagttaagagaaatggaaaattacaggaatttaatcctgaaaagattgaaaaggtaattagtaaagccttgtctgaaacaaaagagcaaggtaatgctaaggaattatctcaaatcgtttgtaaagcgattagagatggaatgacagtggagcaaatacaagacctagtatttgatatcctagttaaaaataaccttgtaatcactgcgagagagtttgagagatacagaactagacggactgtattaagagaacagaaactagacaaagaaattgaaagatttttagattatggagatgatgagaactctaataagaaaactgatgtagccaatgttaagagagatttaatagctggagagtattttagaaagagaagagagaaaatgctacctaaagacttgttagaggctcatagaaaaaaagctatatatcaacacgatttttcagagtgggagaaactcactaactgtagtcttattaacctagaagatatgttaatgaatggaacacatataactaatgcagatataaatcaacctaatagtgtacaaactgctttcaatattgcaagtcaaattgctctatcagtggcaaatcaggagtttggaggcataggttttagtaatatcaatgaaattttatctttttttgctaaaaagaattttagaaagaattttattgaggtatatagattaattcataatgtatctaattctagtttagatgaaactatattaaaattagaagatgattatggtataattgatagtgggaataaacaattagagaaaatatatgaaagagaatttattgaagccaaaaataagacaagaaaagatatttatgatgcttgtcaaatttttgaatatcaggtaaatagtctatctgcgagttcacaaacccctttcatctccttaactttcaatattcctacctcttgggagagtgaagaaataattttacaatatttaaaagtaagacaaagagggctaggtaaggaatatggctcaattcaaacgatatttcctaaattgagctatattatagtagatggttataatttaaaagataccgacccttattttcatataacaaaagaagtagcaaaaacacaaatgaaatgtgtgtatcccgatgaacttttttatagtaaagaggactatgacaatggagtttattatggaagaatgggttagaaacacataaaactatagctcatttaaaaccttgtgaacctagaaatctagggtgtgagagtaacttttggttaagtaggaaatgacttattaatactcttgctaataggggaggtcttatacttataactctacaagtataagaataatcgctatgctaaattttgagaaatcaaataaatgtaaacagactaccgaacagatagctaatttagggattagtgaataactaagtagggtacttattaagtgaaattcttaataaggaagtgcaaggcaactataaccttatttatagttgaagatatagtcggctacctattaatttaggttgtgtgtagaagtagagtaaatcacgagtttagagataaagatggaaaaccaatgcaccactcaagatttaattttggggtgcaaacactctcaatagcacatttattatgggaatgtatgagagaaaattcaaattggaatgaattatcttatcaacaaagaatagataaagtaaaagataaaataaaaagttatactccattaatgcaaaaatctatggaatggagatataatcaagtaaagaaattaaaacctaaaaatgtacctatactatttatggctggtggaattgctagattaaaagcagaagatagtatagaacctttccttaaatctactcaatcatctattagttatggatatattggaattggagatgtactagaagtatgtacagacagacaacatagtataaatgatgagataggtttagacttaggtttacaacttatgaaaactataagtgaagaagcaaataaaataaaagaaaatacaggattccctgtgtcagtatacggaacacctaaaactgtgggtggctacaaggtaacttgtagaaaaaataaaccttatctactaattgattattagggtctaataaggctatcggtcaaagctattataatatgctggtaagagaacctaaaacctgtaataaggtcagaggtaataccgagtggggttgtaataaccttatgtagaggctatccgtgatgagtgtaacggagtacgattgatttaatcacaatcggaaatgataaggctacctgaaatattaggtagaagatatagtgcaatctctaaggaaacttagagttgaactcggcagaaagttcaatatatacttattttgtaacagatgtagaaaactatggggatataatacctcaatggttgaaggacagaggatattatactaatagttttcactacccatcagaacaatctatagatgcttttgataaaataaaagcagaatctaacttccataaatattctaatggaggaaatattacttatgtagaaaactcaggtaaattagaaaattggcaagttgcaatagagttaatgagatgggcttatgaatgtggtatagaatattttggagtaaatacagttagcaataagtgttttgaatgtggttatgtaggagatatcccttatgacaatgaaaagaatacttatgtgtgtcctaattgtaataactcaaaccctctaaaattggatattacacttagatgttgtggcttaataaaataggtcattcattatggtaacatagtgtctaaatgagataaattgctaggaaaccctaaagctatacaaactacaaagtgattggaaacaatgagcttgaatgtggcgaaagcagaaaaaattgtatagattgtctaagttgaaataaaagcattgaaagatgtactaaggatttattaatgggtaattagcagtcaagccttagaaatagggaagattcaacgactatacttctcacaaactattataaataggttgaatgaatagtctactccgtatctgtctaaaaggagaaaaatggatttagaaaattatttaaaattaaattatggaaaagaaaaagctaaagatatagcactaaaatataatattagtatacataaaatatatcatttagctaggaatttaggtataaaaactaataaacaacaaaataaacaatttaatataacaaaagtagcacatcaaatactattatcaggtagatttggagatggttcttttaggtctatgggtaatggtgtaatatatagagaaaaacatgctatggatgaaaaagattattgtttatggaaatataataatttaggagaattaactaaaaataataaattatattattataaagataaatatataaattttgatagttcaaatagttctcaattaaaatattatatagaaactccgaagttggagttaatatcaaaactagattctctaggtttattattatattttttagatgatggttgggtattaaaaagaaaaggttattatgcaggtaatattagctctgtaaaattaacttttgaagaaatgaattatttagcttacaagtttaaagagttatgtgaatgtaacacaaaagtagctcaatggcacaaacaagatggtactatgccttatgttatttatattcaaaatataactaaattagtagagatagccaaacaatataagatggaaaatttggacatttttaaaaagaaatttaataaatagaaaagacagatagttaaaatatagcgaaagctacggtataaaggatttagctaagtataatatcacaaaagcagtcaagggtagaattaaagaaatggataagagagttaagcatataaaacctattaaataaaattttctcttgacaaactataaaattaatgctataatatgtgtataaaataaatgaccttgtgagaggctgtttaaagcattttaaaagacataggtatacaattaatcatctaatcttttaaaaccgtttttaaggctatctcacaggctcaaaattataaggggttgattttgtggttaaagtaaaaaataaaaatgaaacaaataaaaatatttttggtaaagaggatatcagaattaattaccacgataatgtaaattttcatttttgggaaacagaagataaaaaaggttattatgcttgtgtagatgaaataattaataaagaagtagtaaatatgtcagataattgtggtaagaatacatgtaaaataatacagaaattatttcatagtaatataatacctttacattggcaatactttgctgatgagatttttagtatatatttctttactgaagatacttatgtgacaccttatatgactctttcagaaattagaatttcagattttgatgatactattgaattaattgttatatctggaattaataaatacactttaaaaacagatgttaaacaactaatgaaatgtagtaaaatagaaacacatacaatagttaaattaagagagaagggattgataatatgattagtaaagtaaatgtacagaaatatgatgtattaggtagacattttaactttaaaatacatagtaagagtagaaaaaatcataaagacttatttaaaatattagataagtttgattttactaaatgtaatgaacaatatgccaaaaatactttagaagtaatagaaatgctttttagagacgaagagtatctaagggtatctaatatttatgtaaattatgataataatataaatattgaatttaaagatgttatgaaaacaacagatttatatgccatattagatattacaggattaagtattagtataacagataagataacatttacttattgggtatcttcgatagataaatgggctaaacataagtcttatgaaatatcttcagaagaactaacaaagtattttactattactacaagcatttatggacattttagaaaagaaatataggaggtaattatgcaaatttttattttagtattagtatttttgattgcaattatgattgcaggtaaagttattttaagtaagagagataagaaaaaggaacaatcaaaacctcaaaagactgtagaagaattagcaaaagaagaatttgaagatagaattaaaactcttgctgataacaagattaaaggtgttcctatggctactattttttggtataaagaaaatgtgaataactttataaattatgttatgagagaatacaatttaacaagagaacatatagccatagaagagttacaagactttacaaaggtaggtgtattttggaaattataattagtgcaatagtatttataattgttataggagtatgggcattgaatattataactcctattacttttatcttatggttcttaaatttattaggtatatttactataaatagaataggaacaatattactaatagaaataggagtatggttcatattctttataatagtattctatgcagggataaaaggttggttacctaagaagaaataatccctattcccttagagggtataccccattaccctttacccctattccctttttcagattttcaaaatttgaaatttcagaaattgaaaaatagagatgtagagtatatgaggtatgaaagagaattaaatatagtagttaagttacaaccttaaaatagtgtgagtaaaatcacactattttactatattatgtgagtatactcacattttttaaataattaaaaggatatgataatatgagaattgctagtattgtagataatgatagtattaatagtttaactgggtttacaacatcagtatactttcaggggtgtctctccattattgcgaacattgttacagtaaacagacttgggatataaatggtggacaagaaatatattatgaagatgtatggcatataatagaaaattctaaatgtaagaatgtatccataattggaggagatgtatttcaccctaaaaatagacaaataggaataaatcttatatatacaataaaacaaaatacgaacaaaacagtatatgtatggacaggctactcaaaagaagaagttgaacaatggatagatttatctatgatagattttttaatcacagataaatttgaggtagaaaatagaaatttaaagatattattaagaggtagcaccaatcaaagaatattttgtaatggagtacaaaagacagataaagagatactagaaatgttaaatgactaaaacaaaaaggacatctaattaataggtgtccttttcatattcatttatttttgaaaggaggttcaaaataatgaaaacaagaaattttagatacttgacagttaaagaagtcaagtgatttatataataaactctactgtaattagagttattactaagaggttgctagggtactttaatatttgaaaggagtgtaccctagacttttgatgttaaaatgaaatttgaactataattatagtaaaattcagaaaacaaagagtactagtaattaatataagatatttagtatcacgactaatgaaaatgcctcgaccgaagttaagatttagcctcgacctcgctgggctagttccaaacagtaagaggagagaagtggtgggtcgctcgtggcaatttctaggtgttagcatttaagacaatctgttctaatttttaactgtttacttttagaacattttgtgatacttattaacagtatgtttttaatacactatgttctattttagacatttacaattttagaatagaatgtttgattttttgaatgaatgctcttaaaagaaagcaacttctaaaatcttaaatgcttgatactgattataattaaattaaaagcaactttaattataatgtatcttatttaattgctaaagttcaggtcttaaaaggttgctatcttttaagtcaaaaacattatagcatactatttaaaaaattgcaagaaatttttataaatttttaaaataattttgtaatgctggtaaatgctggaatttaaaagaggtaaaaagaaaatgctatactattatatattatatgtgatttttgagttgatgctgtaacaatagaatttatgaatagttaagatgtattttaaaaattatgaatatttttaaaattttttattgacatattttttagtatatgatataataaggcaacgaaattaaaaaggagtgaagttatatgaagataaaaaatattaaaatgaaagaaaatatcatagttttgaaaggtaaaagatttaaaatagtatctaacttaggagcagttaaaaagcttataagaaattttaaaaactattgttatcaaaattcaattttaaacatcacggagaatcaaaacaatttagaatttaaagtttttagtgataaactaaaaactaatataattgacttaaattgtgaagttgtagcattataaaaaattaaaaggagtgaagttttatgttaagaattaaaaattataaattaaattactatgatatagatgtgatagaaacttttggagaaactaaaaaatataatcttattttctataaaaatattattggaaaagatggaagtaaaaaagaattaaaaacctactatactttaatgaaagattatacattaaaagactgtttagacactctagatgagtgtttaaatgtagaaaaaacaggggaaagcattatggatataggttattactcaggaaatatgggacttgtaatttcttataatgatgaaattaaacatataattaagtgtataaaacatttttaaaactatttaagactaattatcaatttaattagtcttttttattactggaactggaagcaggttataaaaatatccgataatttttattaaatttaaaatggcttttaagaggtttatacaagttatgtatataattatatagactatatgtataaaatgattttaaaagatatctgatgactttaaaaatacaattatagaatattagtttaagtaaagagttggaacttattataattataaaaatattttgatgatggaaagctaggtaaaatggtttattctggagaaattacaaaaatattttaaaaagtgtattgacattttttaagaagtgtgatattatatagacacttagaaaagcagatagcaaaaacataaagttataaaataattaaaaaaaaattattgacataaattgaaacgtatgctataatggttttgtaagtaaagaacattgaaaattacatattttaaaaatttgaaggaggagaattatgaaagactttgcaagagttatagatgattttggtgttaaaaatcaatatgtcatagcaacagaaaaaggagttgtttttcaatcatataactctataatagtagtaatagagtatggaaaattggtttatataggagctaactaccaagcttctaagactacgggaaaatatagaaataaattttttaagagttatgtatcttacttagcagatttaaaaaatttagacaagtttatatctgaaaaaatggtatatagccaagatttgcaaggttatgtactaaaagattaagaaaattcactagttgcataaaattttaaaaagttttatgcaactagtgaaaaatatattgacatttttaaaaatttatagtacaataaagtatcttaaaaattatggaggtctaaaaatggaaagaagagcagaaatcttgctagaattagcaaaagaggtaaacagttataatggatgttttgaggatttaacctatacttttaaagatttagaagaattaatagaagtatcaggaaaatccggagttgaattaattagagcaactttttttgggggcataagaaattggttagatgactatttttacatagatagttatggaaatttctcaagttgttctgagaagacatttgaaagagaaattttaaactgtaaagatgaaatcatagacgaatttcttgagatttttggagatagtttgaaaaactatcaaagagaatggttggaagaattgggagttgatttgaatgcttaaaagaaattatatatctttagaaaaaaatttaaaagattataaaagatatacaaacttgctaggttcagatatagcaaatttaaagatagaatcaggaaaatggatttatataattaattttgaagaagatggaacttataaagtatatactacaaaagattatactgagaaagaaattccatcacattacacaaaattatatgaatttaaaaattctataaaattaatagatgatgatgattttatagacttcgaagctggaattattgaagtgtacaaagctggattttctgtacttgtaaatttaaaaggtaattaaaatgcagaaattgaaattaaaaaccataataattatagtatacataattcttttatgtatactaaacatatggtttagtgaatggttaagaggtttatttttacctagtgcattgacactggtattattagttaataaattgtagtgtttacctatttccctttaccaattatggtaaattgagattttgagagtttgaaaattggtaaacacagattaaaaattataggaggtattagaactatgaaaaaaatggaattagttggacttgctggaatattaaataatagaggtgtaaaaaatacaaaaagaattttaaataattacttgtatttcttagtagaaaataaggtaaatgtaaaggaaatagttgaaaaatcaggtcatatagacataaaatatagcactaagactggaaaaaaagaatatatactacatttagataatacatttttaaagtctaataatacaatagttacagtttgttagctgaaagtaaattaattaatgctagaggtggaactgtgggaaaatataaatatacattaatgtttgtatatataattagttgtagtattataataaaatttatataaaagatttaagacatccataattgttttgggtgtcttttttaattggtgcaggaaaagagttataatataaatttaaaagttataggatagtgttatttactgttttaagatgttagcttataatttatatatttaatataatataactctttaaaacatactctaatagctttaaaatagatttaagatatataagttataattaaagttgttactagtgctagaacataacaagtttataaaattaatagtatagttatagatgt

SEQ ID NO: 6 - DNA, 38308 bp, Artificial sequence
  bacteriophage genomic nucleic acid sequence
taaacctttattgataaaagttacagggaaagtccctttttctccatctgttaatgctatttgtttaaaacttaaattcaatggtgaattttgcaataccttaaactttataactgcatcataatcattgtgttgatttatgcttcttgccccatcaataccctttgttaaacttttaaaatcactatcatattcaatagtaatttttgtatcctctgcataatcttcaactcttgttttacctataattaattcataatttttgctgttgtaattatatgtatttgccatttagcacctcctaaacttcgaagaacaaatctgctgataattctctaataccataagcatagtaaactgtaatttttacacctgttaatttaccatttaaaatatcattctttggtatttcttcaagtggcactatatcaacaactgtcttatcttctactaacgatttcattctttcaaactgtttacatctagttaatataactgcttttaatgggtctacatctgcaaatgttggctttggagtagatttcaaatattgtgtaatatcttcttctaatctaaattgcaatgcttttacacagtgaataaaatctattgggtcgcctgttacagttacaccattagcaagtcctagttgtcctttcattcttgcaacatagttagctttattcttgtctaaaactccttgttctgctccacttaaaccactttctactgctccattgattaacttattggctatcaatacacttccagggaattgtggtattgaataacctgcaactgctcctgctattaattcatcattcttactgaaaaataatgatgttgtatcttctgctattgcttttattttagcttctgctgtcataatatctgtatctgtttttacttgtgcaaataacattttttgtcttgctgcaatttcttttgatatagctggtatcttttctatatcagtttcatctgttacagtaccaaaccaatcatttttaacactatcaaataactctttataattgcttccagttactaccttaccaaatactaatacttgtttagctcctgctgtaaatgctgcttgtaatatcttatagacatcatctgttgctgcaactcctgttacatcttttatacttgttattaattgctctgttatagctttcttagtactaaatacaccaattacatttactgttgcttggtcaactgggcttggcttatgtgtattaagaaatactattttcttttcagcacctaatattattcccattaattgcctccttttatttcaaaatctacatcttttataatttctatttctgttcttagttctttagaagttcttacagtcaagtcaaatacatatctttcaagtaaatcacttgctgaataatccgtaatgtccttaatctctccaacttcctcaataactaagttcagtccatttaatttaatccaccaattgacagcttctatatttgtaaaataatctctaattattgctacatctataaaactatcttttttacttagagtaaatgaaaaacttattatatgcttgtttatatttgtttgcttgaatactccgtattttttagtatcctctctttcgtttgtatatctatgaataacattatttgatatagtccttgctattactcttggtaatttcagttgcccatttacttttgatagatgttcaaatggtataacttgaaatttattatttaattcttttattttatctaagaacaatatttctaaatctatgttattcatctttcatcatctccaacacaaactcattaaaatctgcatataatcttggcaataattcaactactctataattaagattctcaactgttataatatctcctagtcttaatccatagcttttaagtatcttcccattaagttgatttaaaacttttattgctgaattaggatccactgttgctacttttagagttttcttataaataaccatatcccaatgataaacttcttctgctccatctggcttgtgcatatcatattcagattttctagttacttgatattttcttaactcattcttagcaaattgtgataatttgaatttcattttaaatctccttgactatgtactctaaactattaaccattgtcctagtatcaattaaaggctttgaatctttcccttttctttctcttgcttttatagtgctttctgcaagttctgcccaacttccttgttctatacttttttttatgtattgaactatttgtttgcctatatcttcaaaacattgtctagcttgcattttcccactagcaacttgatttgcattaaatataaatctattcattattttttgcatattagcgtctattgctgttctccaaaatggtcttgcaggataatggacattaaaaccctcgcttccatattctagccacattgctatcaactcaaccttttgcccgttagcttctacattatcttcattgaactgtacaactaacttccattgtgctaacagatttaattgtttttctatatctgtgaatttttttaaactttcagttgtgaattttacattaactccaatcataagtcttccttacatatttatataaaatagccttagcttgtgaatttgcaaacataatatttcctattttgtttgtgttatttgctgtataacttacagacatatcactaatactcctacttgctattcctttttcaatatctcctgtatagtcatcttctaaatctttaactattgaataggcttctaatatctgtgcctttttaatttcatcaggtacttttgcttcgtctattctagggaatattaattcttgtttatcagattttccactatctcttatacataaactttcaatcttatctaatgctttgtataagccttttgatagctcagtatcagatatttcttcatatctgttttttataaattcttttgcttcatctaatgttacataacctatcatttatcccccttaaaacaaggggagagcttttaactctccattatgcttgtgatatttctaattcacatagtaattttgttttacctgtttctgtttccataacatcacaaccaaataattgtaatccttttacatattctccgaacgatttttcaaatcttccagcttccattttgtttatttgcattgcaagagttaatccagcacttactcctgccatacagtgatatttttttgctgttctttgtacattgttagatttatagatagtaaatcctccccagcttccaataaaatagctttgattaattcctagtgtattttccccttttgaaattgttggaacttcttttataagttgcccataaatttcaggtgaaattacaagccatctatttgcagtagggacattgtcttcatccatttttactgctaaatctataattttatctgatactttatcagtacctataacaccagcaactttgcttttacattttgcatataatttagcaagttctgtatcaaccacatctgccatttcatatatagcttggtctgttaatgcttctataactcctggtatagcttgagccttatcaacatcgtccatttttaaagcaaaatatttagctttgttaatattaattgtttgatatgctcctgtgtcttcttggaatgttatatctgctcctgtataatctccaacagttactgaccctatacttggtactcttacagagctacccatattttctattttcccttcataatttctgtttgctaatgctccaaaaactaattgcttatttaagtttctatttgttaattctgcccatacttctggtttaaaagtttgatatgacatatttatatcctcctatttttctcttaatatttcctttaattgttcatctgttaattttgatttttctgcatctgacatttttacaaaatcttcatatttgacttttgaattaccattattaggtggtaatggtggtggtgtagtgcttcccttttcattaaataaatctggataagttgttttaaaattagtaacttgctcatcaaaacctgtaatctttccatctttaatatctaatttagagaagtctactgcatttacaagcattgaactatatttaggggaaattgctcctagtccaaaacttactgctgttttaatggcttcctttttataatcatcaaaactgtttttaaatactatttcttttcctaaatcatcagaagttaccttatctcctaattttgattttaagaatttaatagcactttcattatacagtttatctgataggctttgatttttacttataaagttagttactgcctctgttgttaaaggcttgtctacttcctttactgtttcaatcataaacttgttatcagttagccatttcttaccttcatcacttcctagtattttcttttcttcatcagttattactatttttccatcttttaattccattgtttctcctctcgtgaaattactctcacaaaattaatttaatctaataggttcagcccaacatctacaattaaaatcttctcctggtaattcatcattgatactaaatactaaaccctctcgttcagcgtgttctggtctaactctatcatctttcatagtatgccaaacaaaatgctctataccgttctcaatcattaggtccttaacctcttgtgcatataaatcaccagtttcatttcttgcaagattctcatttctttttgttagccatttttgtaaattattaatatcattttgagtatatgttccattttctatactcttaacaatatctttaatttcttgactggccctattatttgctatatcctgcttcaaagcatttaatgtagactttggtacttctccattttttaatacatctaaatttctattataatttttgattgtatctattatcctttgttgccttatatccattaacttatctgccgtaactgttgtattattaaataaatcataattcttttttatccagtatttagcaccagttaaatcagttctttttaaatcttcatctgttaatgttctccaactctcaaaaactgataaattaacatcaatagcaacctttgttaaatcttttataatgtttcttttttcttcatctgttaattcaaataacggtaattgtccattacttacactttttcttgctcttccaactcttttttttgtataaaattgaaatattattcttaatctattttcttgtgctaaggggaacatatattattcctcctttacttctagtcctaaatctttcattatatcttttgaaagttcatcaacttttacttgtaattcttcttctcttgttattccagcaagtatatttaaaatgtttataagtttttcttgatatgctacattagtttttattaatgttatttcttcatctgcttcttttccaagtattcctaaaaacttgatagctgtttctaaactcattacattattttgaataccttgtactacaatagccatcttttcagttaaggataaactcaatatatcttgtgcttctatttgtaaatcaatttcttgtccttttagctttctgtatccccatagaatgatgtttttaattcctgtgatacatttacttcttttgctttctactgttgcaatagtcctttccaaacttcttcttttagcttctccacttgatatgcttcctcctaaatcaattccaaaagctaggtcatttactcctaattgtttataaatatcattcttgatgtcttctttatgtaatttccattcctgtgtcttagtttcaagttgcacttgtttaacttctttatcatctttatttacaataattactctaccgtctagtcttactgtgcttctaccatttttatcaatttcaattacactgtctggcacttgtagcaacggattagcaactttttgaaatgcttgtgatgttaaagtatctccaattactaactctcttacatttccaactaaatcatcattataatcacttttaccgaatatattttctacttctactactgcccaaccttgtgcttgattatctctataacctaagccatctggtatcattccattaatttttaaatcataaggataaggcaattcttgtatatttttatctattatcttatatgctctatattcaatactatcaagctcatagatttcacatataagcgtttttttgcttttatcatcttgtgataggttatagattacatatccatctattaatttcggattatattcatttcttatagggaagtagtcttttggtgttactggatagaaactaaatctatcaagctgtgtaactccttttaaaagcaatttaccagcccaagactgaataatcatagctttgcctagtaaatcatctaggtcaaaatcttttataagctcaaaatctttctgattagtaactagcttcttacttgttgcatactctgcatatagtcttgttgttgcctgtaatagtccattacctacaactaaatctttaagactatatcctatactatttgttcttaaacttttaaagttatcaatataataagatttaatatagcctttattatcaactattcccatatattccaaatttactcttgctcttacatctgcaaaaaatacatctgcacttttcccatctgataactttctgtatttttcacaatttctgtgaatatcagtttgtatataatcgttatatgcttttagtattctttccttctccatttaaactcctattggcttcttaatctctccatttttaaatacagtagccttatatttttctaatccatatctcatagcgtccactgtgtgtggatctagtgtaaatttattctctaagtaattcccgttcttatccttttcgtgacatagttcagttaattctctatatgtattaatgcacttatcagaaacgataattttatagaaactttttagcttctgtaatccatctaaaacacttcctgcacctttttcacagtttataattttaaatcctgctcttcttatttcttctgttgtttctggtcttgcattatcagcgataatctctctatgtttatgtttgatatactccatagatttaattaattcgcttgtgattaaattcttgttatataattcatcataaatatataaaacattgttttccctatccagagccattctaacgagtgcattatatgaaatactaaatccataatctaagccatcgtataaattacctagtccatacttgctaagttctttaactattgcttgtacttctttatcattagatttttgaatatttgtaaatactctttctccaactattccaaatcttccctgatatgctattctgtatctttcaatatcataagtttcaaaattctttaattgttttatatattcatcagtaacaaaagcattatcttcaacgattgaatgatgataataagtatcatcagttaagattattcttttatcatataaatcattctcatttatatttgctttttttataaacctttcataagtccaattattaacgctcacagggttattagttaagaatatatgtaagtcttttcctaatgctcttaaacgtccatttaactcattaaatgcgttgtaagatatttccgaacattcttcaatccatatcatatctacattatcaatcgattttaatttctcactatcatctaagcccataaagataaactcactgccatttctacatcttatgtgaagtgggtttactgtgtatgtgaataatccattcaagttgtaattactgataattccttttagaagcgaaaagcaactttcttttatagttctatacactgctctaactactaatattcttcttttctcttgcaatgcctttaatattagttttaaggctgtatggtatgatttactgcttccatatcctccaacgatgtaatagaatctcttatcccagttatttaaataatcaataaaatgctcattagcttgtatattaatttccatttcttttgactccattaatagttatagatacattgttatcttctatgtctacgtcttgtttatctttccatttacttgattttctattctttaaccaaaatatctgtgctcctacatctcctggcatttcttttactacttcttttatataagtgcttttctttccgtctatctcttttacttcttttataacttctttatacttgtatcctactgctcttttaaataaagcattctccacttctatatctgcaacttctttacctttttttatagcctcaaaaaactcaatatatttgcttttatatgtataaaatgtttggatacttatatttaagttattacatatttgttcatctgttaatccatctcttttccaagcctctatttctataagtcttggtttaacatctgtttcatatttacttttagcaattgttatcacctctatttattattcttttatgtcatctatatttttattaattatttttaattctttcattttttctcctgaaaaacaaaaaaggacttaaataaaaaactaataagatttttacatcttaattaatttgttatctaagtccttctactttatattataaagctgtcaatagatttatctacttaacgacttggtcttttagttgttgtttatattatagcatacatatacagtaaattcaatatctatgttttgctttcattttgaattttgacaatatttatatgctcgcatctgcattttatttttaaagtattttcatctaaatactcaactgacttacattttatttttatattatttttgctttttatactggctataaatttattacaatttttacatctgtaaatcaattaattcaactcctcaatattattatttcttttaaaatttaatatactttcaacatatacttttgaatatccatcaattaattttattttattcttaatttcaataacatcatcttcaaattgtctttttaattctataaagttatctacaattttattttgaactttcaaactgggtatttctattatcatattttcaaaacctgatttagatagtcttttaactttttctccaattgatttttgataagtgtaatttctaactgtatctttataatttagaaagaatgatatataccttaagtcaataatatctttaaagctatcttttaatgataagattgacacattgccatttactactgcactttcttcattttgatataaaacacatcttccaatgtccttatactcaaaatcttctaaatttactaatatttgtcctttgttaattttcgtggctttttcatatattttattatctatcttgcttattatttcattggcaaaacaatcatacctttttgaaatttctccataaaatatagctggtttcccaattatatttatatctctttttgtaaaaatatcttttttactcatatactttatgtcaaaaatatcaaataatcttacctctgcactgcctcgaacagagataataatttcaattgcttctctgatacagtcatcgaactcttgcatttattcttacctttcatttccttttcatattgattacatattactcttatttttcttatatttcctattacatcaatatttgctccacattctttaactaaaaagacatctaactctaagttatttttaacactatttatccaaagttcagaagtctgattatttaaagcatttatgtcaatttcttctaattctcgttcctcttgtggttgttgccaaaagcattcagcttctaaaatccattcatcttcaaaaatttgtttatctaatttacagtcatagatttctctaaaaactttattattagttttttctttatctattattataaataaaacagatatagttgtatctgtgaatgcattatcaatcctattcaactcagctaagttatttcctataagttttctgaatatttcttcacttcttctataacctacaccaggaaataaaatataaaaaccatatctttttgtatatttaagagattttaaaacaaatatatcatctacaacccctgacttcttccattcaaagtctttttgtatattcttttgttctatttctaataaatctttaaattttattgagaatggtggattcataataacacaatctacaattaaatcatctttttcatattcaaaaaaacttttaatttcaagttctgtatttttaaaattttccctagctgaattaatagagttttcttgtacatctacaccatacaatatagctggattaacaaattgttctaattgtccacttccaactgcaccatcaaacacagttggattttctatatttagatattttttaactttaccagctacatattttcttagttctgtacctgttatatattcagctaattttttactcacttctctattgttgtgttctttaaaactcatttaattcctcaatttcaattataaaacaatctctatcacagcctaatttcttgcttgaagataattcatatattaatttatcatcttcatatagaaagccgttaaaactatctaatatagctttaaaatagttgtctatatctctttctcttttgctcttgaaacatagttctattttaactttaattttatctttaaaggttttatacttctgtgattttataaactgttgaacattatccctgaactctctgcctttcttgctaagataagttacattgttacctcttctccaatgtgtgttcatactatctggcttatatggtatctcaaacctttgcttcatctcatcacttccacgaaagcaatgctattgaaagagcttctaaaactataacaaaacttaagaaaatgttaaatttttttataacattctttttttctgtttcttctctataacttttatgccaaaatctagtacgatttttgaaatattctatttcttcctcatcttctttttttactttccctgcttcttctgcttgtgttatacagaacattctttcagcttccaatattttatttccagtatttagaatctcaatttcttctttcaaactgtcaatttctttaacataagccttgttatcttgctttttatgtcttagatttttgattaaatttaaaagatactcctcgcattcttccttgctatttaatttagaagcattataaattattccagcttctttattagcttttgttataaagcctctgtaataatctctcattgtcatttttttatttaccatttgttcctccttgtttttctattatttcatttaatcttttaatttctctgtcttgatcctctaatagttttttactattagtgtaatttataactattgaatttaaaccttttcccatatcacaataatcaattaaatttatattgtttgttccatttgctgcgtcgtgaactccaatataatattgtgttactgggtaattatgcctagtatatgctttgtaaatcttagtaaattcaaaagttaaaaatttttccaactcatcagaagacattgaacacattttttgccaaccatctaaggcatctataactgcgtgtattcctttatcagtaaactctacactgccataacttccatatctgacaatagtattttttagcatttgcttagccaaaactattctatcgtctagctcactttctgttgtgtgtgttgcatactgaattatttcagcaacttgtgggaaattcttatatactctatttctaaccatagaaataaaagcattgtctaattgctcagctgttaaattgcttaatgctaaacagtaaatatttgctttttcttttgtcatatctccaactggaaaataatctaaaaattttttaaaactgatgttaaattcttccttagtcattttttacaccatacctcctgttcatttgctctatataatcatcatctactaaaaattgacttgtgtccttactttcagctatcttattgccataattattgcaagtcttagattgcttatattttgctatccattcaggctctaatccttgccattccttttccatagcaatatttatagcttcatctaaaataaaccaattagggaagtctttaattattttctgtataggaactattgtttttattggctttttgatagattttctatattctacatacttaaataaaagctctttataatcttcatcagcttctaagttagtgatatagttttcaagttcatttttagctttttcttttttatatttttctttattaactgtattactaattgtattactaacaactgtattactacctttagcattttctaaatacccctgtttagaaaatttaatagggtcgttagtttttttaataccctctttaatttccttaataccctgtttagtttcttttcttaattcattcattttatttttattaattcttataattcttttttctatttgttttttttcatttttaataaattgaatagttataaactttttttcttcaagtgatgaaataacctgtgaacatctaccttttgttactccaaaaaattcagaaaaatgcgaattagtggcatagcagccatcttctccgtctaaactatctatttctattaaaaatactttttcttgtaatgttaaatctttattttcccatatttcttttggtatccatacacctttaaaatctctttgattagacattattcatcacctacaactttttttagaactttaaaatctattctataaaaagaattttctatatctccaatataacttttttctataattttattagaaattagagtattcacaaccatttcaagttcccttaaacttaatccatttgcttcttttgataattctgcaactggaaaccaatcatttaacataaaagtcgcttttttaagttcctcaattaaaatagttaatacataagtttcattaattcctaacttttctataagttctttgtctagtgataaaaattcttttaaaaaaaatttctttttgttcatttacattacctcctgtatatttggagagccttggtagttctccttttattaattcaattagtagagcctatatagagcctaccaaagcgacatatagaccccactaattcaagtaataaatttactagatacttactagaaagttactagatacttatcaaatactttttaatttctcttgaaaaaatcttaataatttcattgatatatatagaaaaaattaatatttatcttgaaaagtcttaaaaaaaatttgaaagttttacatcaaacacctttaccagatgcctaggattatccacagattaggtcttgccttttctgtgttaggcaaagatgtaagatggtcggtttttatatcataaaactgcaaacgacaaaaaatatagttgtaaattgacggacttacaacggtacggctaactttaaaattcagacgtggtcctataaaatccattagcttgtttacaccctagaatgttttttaaatgccgttttaagctcagaaaacggaagaaaacatatagacacaatattttacgaacttgcatcggcacggctaggtcaaaaatatttaaaaatacgactagcatttttactccaaaactctattgtcctggtgttgtaagattagttcttacacagatagccacaagaaaaacatctttcagatttttggaggagatagaaaaacttatggctatgtgtctaaggactagccttagatttgtattatttactcattatcaagagtacgttacaagaatgtaagcacatagaaaagagtttaaaataaataatgctgttattattgttgaaaatagtaaataaaataaaacatctctattcatttattctcctttctcataaattaaaaaatttagacattaaagattaaagaatagccctttaatcttttttttgttttatactgtacgattaaatcggaattataaattaaaaaaaattataggcatttcaagagcctcttgtaattttaaaagactttgaagtcttgggaattttccatctttcaattttaaaaggatttcggaaactgcttgttttctatgtcccattttattagcaacttcatatctattgagattattttctcttaaatataaatctatttttgaatataatttttgagcaatttctttttctttacttttattcataaactcacctctctttttattatatccgttttaactggaaatgtcaaatatttaatttcaaaataaaaaccactatttaaagtggcttttatttattgttatttatttgcattttttatagcttcagccattagcttagcttggttttctatctgttcttttttataaacttcaatttgctctaaaactttatttttgaaaaattcggaatttgctatccctttaaaattaaatatactagaagatgttgaaatatctatatttccataccctagtattcttccaaaaataccttgactaacataaatatcattaattttgtctaatggtgcatctaatgtttgttttttaaaaaaaccactttctcctctgatttttttatcatacaatattaaatttgtacaataatacttaattaatgctggtacagcaattaataatcctataatcaatggtacaaaaccagcagaagatcctcctattttgaaaaatataattgcttctaaaaaaaatattcctgcaaaaattcccggaataataaaaattttcccgctgatttttgctttcaataactccttgttcataaaactcctcccttaataaatttataatctattgtactataaaatttatagtttatcaagaatagagcagggcacttatttttacttaataatatataatataaaaaccactaattaaagtggttttagtgttgtaaattatttattagcttagtatgattatatattgttaaaatttagttgaagtccattattatttttaatttttaaatttatatcgtgtaataaaatcattgttattgcatttaaaaatggttctcctaaaacttgaactattctactctcttcgccaatttgttgagcatcctgatgactataagtaattttttgaaaataattattcaacatattctctattttaatacggtaatttcttttggcttcaaatatttctaattcatcacctgttccatatgcttgaataaactcatttgcaatattatttttttctctttttattgcatctgtgacatattgtaatgtcatattagttagtcttatatcatttcttctaagtgtttcagcaataatttttacagcaagtttcaaatttatgtataagaaatcaagatcatccagcgctttcaaataatttctctttgttttttctccagcattagaaaaaacatcatcaaatgttattattactagattagatgcaatatctaatatgtcttcatttatttcatttaattcatacaattctaaaattttatctatttgactattaatatgatttctggaactgtgaacaccttttatcattcttgcttgtgttattcctgaaatgatatatttataatttttataatttggtaatgtttcaaaggcaatattagttaaaattccagtttttattatatctgaaggtgttttctcatacactgaagataaactttgtatttttccttcaatgttttccaagttcatttggtttaaaattaattctaattccatataaattactccttttcttccatatttattatttcagtttcttctatctcagaagaatcaaaatatatattttctaaataatctacaattttttttaagtcagttgctatactttttaaaccttttttcattttttttgttttttctttattatttatatcaagcagaagtttaacatctgcccattgttttgaaatattttcattaaaatcccaaatttttgttattaaaagactattgctttctaaatcactgccaaaagctccaacttttctttttgatatataatctaaattttcttttttagtaatactatacatattaactttttgtctaagcatctcattttcttcaattaaatcttccattttatttaaaatattttcataaactttattattttttatttctaattttgaaatatcttttttatctaagatgtttttaataaacttcttatcattctggtttaacctttttaatgtatataacttttctaatgtttttttataaaaattactactagtattttctaacatttttttaatagtttttactgataatttactttcttttgaaagtttataaacactaatattttcttgttttaaatatctttcaattacttctttaatagtggtatttttatctaaattttctttcatttttactactactccttttttaccttttttatataaaaaagtatagcacttttattaatattttcaaatatcccccctcaatctttttatttcttccaacatcaaaaaattagtttctgtttctttaaactcatattcctcaaatacttcatcatctggaattaataaataacttgcaaataaatttgcttcatcttctaatttacttcttcttagtaaacttgtgttatctatcaaaaactgatgttcacttgatgaatgtaaaatagcgtgtcctagttcatggcaacaaactaacattttgtcaaactcattcaattttgaatttataaatataaattttctccttaaaactcttttaaataaacccctaacctctcctaaatcttcaattaatacttcaatatttagttttttagctagtttaaatggatttttagttccatattttacaatcaaatctaaaacttttaattttatatccatttaatcgcctacctatttctttatcttatttttttcttttgcaataaaaaatgctgattgaatagccattaaaactttttctttatcttcctctgatatagtttcatcattaaacattaatgctgactgttctataatatcattaaattgtcttttgcctctactgtccaattgtctatatagtggattttgaagtatctttatacctatgtcttttggtacaaaacttgaaaatagttctcctctttcatcatctgttaattttagtgcttttgataatttttccaatgtttttattgtagatttacttttaccagtttctatatctccgactgttccttttcctactcctgcaagttcagcaagttgtactattgttaaattcctactttctcttaacttttttaaaactattgcagttgtattcataaaaacctcctattaattaagtattttttatattataaaacatttccgattaaaataaaaattttttcttgacttatccgattatttaggatataataaagaaaagatatgatttaatgtgaattacaaatttttttaaacaaattatccgtttaaatcggaataagggggataaaatgaaaaacttcacactagaatttacatcaggacaatggaacttatacacaaagaataaaacaaaagtaggaacagaagtattaaaacagtttccagaattaaaagatttaagttacttagaagatgaatatacatcaatagttgctacttatgatagcgacgaaggagttggatatatagatacagaaataacagctcctaaaacagaaaatatatattcatttaagattaagagtaaaaacttttctgaattcttgaaagatttaaaagacttagaaaatgaaatagaaatatacaaagataacattactggctgggaatatgaaaaagaggatccatacggaagccgtgggttatcaataagagattttatataggaggagaaaatgaaagatttatattttttatcagaagaaacaagattaatatttggacttgtggaattaacaggaaaagcacaaatggactttttaggaatagaccaaagctattacattaataaaaacaaggctaaaaactggtacgaagaaactaaaagcaagattgaaaatagcgaacatcctatgaaagatgtagctattgaaaatctgaataaattatataagggtatgggaggaagaatataaatggcatacatagatagtgagaaattaaaagaagaaataaaaaatgcaatagatgaagaagaaaatacagactatcacaaagatatagtaagaattggaatgaatggtggattaagattagcattacaaataatagaaagaatggaaaaataggagggaaaaatgagaaataattggagaatatatttatcagggagaggatgcaggcattgtagacctttcctagactggtgcaaaacacttcctgaggttaaggaagatagaaaaggaaataaatacatatttgtaaatgaacttttgaaatataaaggtcaattagtagggacaaacctacataaccaaagtcgtcttaattggcaaacttggttaaaaaatgaagttgtggcttttgatgaagtcaataacttcatagctggattaaatttaccagctgaaataatggaaaaaataaaaatatatggagttgctacaactcttgatagtaattttaaaaaagaagaattaaaagaaatctttaagactgttggtcttgaagaatggataggttaaggaggaataaatgcactgtaaaacattaaaaaaatactggaataaaatacctttcccagctggaataacattagttgaagctgtggaaataatagaaaaatatatagaaatggagggagcaaatggaatttaaaaaggcaagtttttggcaagtaataaagtacaaaatcaaatgggtaattaataatattgattatttatttgatagattagaagaattgatgtgattttatgaaaaaatacatatatttcaagtataaaaaatcaaagtatgcaaatgaagaagattatttttttatgagtgtatttaatagaaaattatcagaagaagaaatatttaatgaaatattaaatgaaagagatacttttttaggggaaatagatacagaaaaaatagttgatagttttgtagaactttttaaaaatagtgaatataaaaatttagctccatcttttcttgattatttacaagaagaagaattgctagatataagttatgaccaaattggagatattttagaaattttaaataaataggaggagaaaatgaatatatatgaaaaattattaaaagcacaagtggagttaaaggctcctaaggggcaatataacagttttggaaaatataaatatagaagttgtgaagatatattagaggctttaaaacctgtattagataagctaaaacttacattatttataagtgatgaaatagttgaagttggtggaagttataaactagaaaaaaaagatgaaacagttgaaactgttggcagaaaatatgtaaaagctactattactcttgtaaatatagaaaaacctgatgaaattattaaaacttctgcacttgcaagagaagaagaaacaaaaaaaggtatggatggctcacaaataacaggagcaagttcatcatatgcaagaaaatatgccttgaatggtatgtttatgatagatgatactaaggatagcgatagtactaatacacacggaaaagaagaaaaaacagaagcagaaagaaaaaaagaagcaatagaagctattaacaaacttgcagatacagaagaaaaaacagaaaaagtatttgatatgataacaaaatttaataaaaatagtttgttagattgcacaccagaagaattaaaaaaagtatatacagaaattaaaaagaaaggaatataaaaaatgaatatagtaattttaaaaggtaggctaacaaaagatgttagtctactgtttgggcaatctggaacaccttatacaagttttactgtagcagtaaatagatatagcaaggataaagatttaacagattttatactgtgtactgcatttaagaagacagcagaatttatagcagagtatttcagaaaagggcaagaaatactgataaaaggtaatgtaaaagttgatagttatgagaaagatggaaataagataactagacaatacattattgtagaaaatgttgaatttgttggaagtaaaaaagatgatggaaatagtgcaaacagtaacacagaagcaacaactgatgatattgatgaggaatttcctttttgattttagaagataggagtagttaaatggagaaattaggatatagcagacaaactcaaaaacttatatattggcttttagatgactttgctaacttttggcaagggaatgaagcaggagcaagaccatcatttatagagcttgcatatacaaaggaagttatgaaagctaaatttgtaaaagtctataatggatttgatactgttaaaaatgctcaggcgttcctaatttcttctatttacaataaagacaatctaacagtagatgaactcacagacaatgttataaaggcattacagagccttgcaattcaaaatggtggatttagtttatcacttaattcactaactcaaaaacaagccaatgattttgttaagtggctatttgaaatggctatctattgggagataccgcttagacaagagataagagatttgtttgctgaggattatcaagaaacatttatatgggtaactcttaaaaagaaaatatgttgtatatgtggtaaaccaggagagttacaacattttgatagagttggaagctcgggttataaatcagatactgggcttaattatagagtgatgtgcttatgtagagagcaccacgatgaagctgataactgtataagtagaatggattttatgaagaaatatcatcttgctgggatatatctaaaccctgaacaagtgaaagaattgaaaggaatatacaaagggcactttcaagcatttaaggaggagaaatgaaagtaaaaataattttagaatttaatccaagtgatttagaaaatagtataaataaatttttaaaaagtcaaaaaataaaacttgttgatattaaatttggtggaattcaagattgtgcagttttaataatttatgaagaaatttagaaattagattatataactatttctattttggaaacagccagaaaatacagaggttgaacatattgccgacgtcgggaagatgtttaattataaggaggagagatgaaatatataaaatttgaatttggaaatgggctttacgatttgataaatgttgaaaaagttaaaagatttattatttggggaaatagaatagatgttatttatagtgatggcgatggttgtggtcatgatattgatagatacatttatgtaaaagaaaatgaagattctaattcaacaagattgaataattttgaagaagtaaaagaaaaacttttaaaaatgtgcgatgattgatatggaagttaaaaataaaaaagatatggaaatattttataaaaaagccttaaagaaaatattaagctttaaggctagtgaacttagtacagtggaatttgagcaagtaaaaagaaatgctgaaaagctagaagtttatagatttgtgaggaggaagtaatggaattctttaaaaaattaaaaaatggaaattttgaaattaatagaaaaactttagaagaattattaaaatcacattatatgtttcaagcgttgcaaggagcaaaagttgataagtgggaatggtactatgatgctagaagaaattatttggaagaagcatctcttggtgtagaagagccttttgaaagtattgatgaattagtaaattttgaaatagattcaatagaataatggaggaagtaatggaaaaagaaaaggtattagagatagaaagtcaagaagtatttgataagatagcagtgagaattaaatatttaaatgatgatttttttggagatggtttattaaaagaagatgttgaaaaatataaatgtagttttatagaaagtccaacagatttagaagaacgcataatatggctatatgatgatatttatctatcagataacaatatttattgttattgtgaagaaacaataaataaaataaaagaatttgttgattatgtgaatgaagaatatggaatacctaagagatggagagcagaagaaggagaaaattattattctattgctggtgtagatgtaataaaaattgattcagaaaatttagtagaattagataatcgtagatatgaattaggtaactactttcaaacagaagaagaagctcaaaaaattataaatagcaaagaatggcaagagttctgggctaaggtaagagcaggagagattgaatgattaagcatattgttagcttttcaggaggaaaagacagtacagcaatgcttttaatgatgttagaaaaaggattacaaatagatgacattgtatttatggatactggtgtagaattttcagaaatgtatgagcatattgaaaaagttgaaaagtacataaatcataaagtaacaagattaagagcagagaagagttttgaatatatgttacttgagtatgaaaagaagaaaggcaagaataaagggcaaaaaggttactctttcccagattttcgtaatcgctggtgtactcaatattttaaaaagtctatgataaaaagatacataaaagaaaattacaaggattttgaaataattgaatatcacgggattgcagttgacgaagtaaaaagattggagaaaaataaagaaaagaatatcaaatatccacttgcagaatggaacataacagagcaagaagcattagattattgctattcaaaaggttttaattggaatggtttatataagaaatttcatagagtttcttgctggtgttgccctttaaaatctttaaaagaattaaaagtactatacaatgaatatccagaatattttaaaaaattggaagaatgggaaagcaagacatatagaaaattcagggctgattatagtattaaagaattaaggattagatttgccagagagattggaggagataaatgattgaagtagttaatatcaatagcaaagaaagtaaaaaaataaaatatagacacatttatagttcttgtaatagttgtaattgcaaaaattctactaatattatttctgtaaggcaggatggtttaaatagtggaactataataaatttatgtgataaatgtttacaagagttaaaaaagaagatagaagatttggaggttgaaaatgtggaagtgtaaagaatgtggaggaactgattttgaagcacatttagacagttctatttcatcaggaataattttaagaaataaaaattttgttgtagagaaagataatgtaattggttttgaatgtcaaagttgtaattgttatcatgagaatatagaagaattagctgattgggaggaggaagaaaatgagagagattaaatttagagcttggcttaaagaaaaaaaagaaatgattgataatgcaagaccagattttttttgtaaacaacttcattatttacgtggtaatagtgcaggagggcaagatgtattaggcgttagtactgaagatatagaacttatgcaatatacagaattaaaagataaaaataataaagaaatttatgaggaagatattgtaaaacttagagctaatcacggaattggagtaattaaatattctgatgaatggggagcttttattgttgaatatattaaacctagaccattagcagtattgggaatgaattactataaagaagatatagaagtattagggaatatttatgaaaacccagaaatattaaaagaaaataacaactaaaaatttatgaccagcattggtattaaaagaaaaataaggaagtgagataatggaatttaaaagacctgaaacttttgaggatatattaaatcttcaaaaacatttagatgaaagtatacacagttccagagaaagaacacttgaagatattaaattatctttaatagctgaattaattgaacttaatgaagaaacaaaatacagtcacaaaacttggaaaactaaggaatatgatagagataaagaactagaagaattaaccgatgtatatttcttttttgcacaactagtaaattataaaagcagagatggcagatttaaaaaagaatattattgtcgtgagtttgaactttttcctaattattatgcagatagttattttactggattaatctataatttgacagttaacaattttagttggttctttggtggtttactaacttgttctacaaaactaggatacacaaaagacgacatattaaactgctactgggaaaagtggcaaaagaatatgcaaagaataggtaaggagtggaattgattatgatagatgaattagatttatatatcaaaaataatagcagtggtttttttcacgacagtagagaagatgtaaaaactttatctaaagcaattaatgcaatcgtagaaaaaataaatgattgcattgttactttaaataatttagaaaaagaattggaagatttaaaaaaggaaggtaaaaatggacaacttaacatataatgctgatgatgttacataaaaattgaaatttaaagtatgaggtggtaaaatggaaataccaaaagacaaaatattaataaacccacaagaagttatggcattaactgggctagaatatgattgtgcttgtaagattataagagaacttaacgaagaattaaaagcaaaaggatataggaccataagaggaaaaatcttaaaagactatttatttgaaaggcttggtggtaattatgccagcatataaagatgataaaacagggaagtgggaagccctgttttattatacagattataagaatgaaaggaggaagaaacacaggaggggctttaacactaaaagagaagctcttgaatttgaaagagaatttttagcacagagccaattttctattgagatgacctttaaatctttatattcactttatcatagtgatatggaaagcagaattaaaaaaacaactatggaaacaaaagaatatatagttaatactaaaattctaccattctttgaaaaaatgaaagttaaggatataaagccaattcatattagaaaatggcaaacagatttacttaaaatggaatattcaaaaacatatttaaaaactatctataatcagttaacagctatatttaattacgctataagatttcataatcttgataaaaacccttgtcatactgctggaagcataggaaaaaaagacgctgatgaaatgcaaatattatctttacaagaatttaataaaatgatagactgtgttacagataaagaaaataagtttttttatatcattttattctggacaggaatgagaaaaggagaacttttagcactaacttatgaagatgttgactttgaaaataaaacaattatgataaataaaaattttcaaattgtaaaaagagaaaagttaataacagttccaaaaactccaagaggtagaagagtcatcgcagtaaatgacattgtattaaattgtattaaggagttatggagtacatcttataaacctaataaaactgacaagatattttatttatctaaagattctttaaaaagacaattagatactgcttgcaaaaaggcaggagttccaagaataagagtccatgatttaagacatagccatgcaagttatttattatctaatggagtaaatattgttatccttagcagaagattaggacatgaaaaggtacaaactactttaaatatttactgtcatatttgtcctagttcagaagatagattaaatgatgtgttgaatggttagagtggttctaatttggttctaaaaaaatttaaagacaaaatttttaagtagattttgtaaactgcataaagttaaaacaaaagaaaacaaggtgttaaaagttttataaaatagagtgggaatagtacaagtacatacaatattctattgattttaaaagaaaatctattttaatattttgtctttggttctaaaatggttctatatataaaaaatgtattatacaaataaaagcccagctaacaactggacttttttattatattttctctttcctttataaaactttcaatctcttttaaatcttctaaattagcatatttcaaaatgaaatttttagcattgcttttataatttgatattttttttctttctctagcttctttattgctttctaaataacgattattagcttcaacttgctcttttgaagttttataaccttttcttttttccatatatcctcctaaattttccctaattggaacaatagcattttgtacaaatctttagatttcactctagcataattctcttttgcatctttaattttataatctaagtctatataatcataaatataaagaacttctgtatcatttattttttcaattttaaagaaaatgtataattctttgtaattgaacatagccaaatctaaagtgagctcgttaagtaaatcaaaactttcattatatataatagaagtttctttagtttgatattttttacacaaatttaaataggtatccacattttcaaattcatagataatttgctcaccttttgattttaaatagtctgctgtgagtagtagcatttttcctccttaaaaaattatagtattagctaagttgatatctatcatttcgtcgtatatttcaacttccacaaattcaccataaaagaattttctttcaattctagcatttaattttcctcttagataattataaaaatctgatacatttacagtattttcataatcttttaattcttcaggtaattcttttaaatctacccatattatttgattttctaacccatttaaaaaatcagttttttcaatttgcttttttaaaattttaggtatatatatttttttaatttcattaggatttattttatcttttataaattcatcataacaatccttatttacatcatttttcataaatttatttttaacagcattttcagtttctacttctaataaaactaatccgtattgcataaatgtatttaattcagtttttggagaaaataaataaactacatcttttgaattattacttctgttgttttcttcccaattgtcatttccagttactgatattggaagaattccattttttaatatgtcttttaattcttgaagtcctacatttttaaatagtttcattttagatcctcctaaatttcttttatctttatgatataattatatcataatcatatgattatgtaaatgctttttttaatattttttaaaaaatttttttaaaattttaaacaataaaaaaaggggcaggacacaaaagcctaccccattactttatgaattttctaatctcctccacatctttttttaattctgtctggtccttttgcattgcttccaactggtctactatcttctgcatagtatttctgtaaatttcaaatgttttactatctttccataggaaatacagtaaaatagcccctactacaccgtactcaagtaaagttttttccataatatcacctaatccctagcactttattccaataagtataatattccttagcctccttagttctatcgattatagctctatccttgtatccctcattctgcaacttagctttccaagaagtttctccaaaacatttaactgccatataaaattttcttctggttctgttatctataccagtctctttcataatgaaattaaatatcttgtctgctaatgtacgattaattccagtgttgttgtatgtagagtataaataatcgtgtataactgctgcattaatgtatttgccataaggattatatagccattgcaaagatttaggtactgaggctccatcagtgatgaaacctctaaacaccttaatatcataaccattgattgaataaatataatcttggagtaaaaccgcttttttgtttgaaagaaactctaattttaatttagttttctccatcttcattaccttttatatctaccttatatccattagcaaaaatatcagaaaacttttgtaatgtcttttctataatatcaatcattctttttctgctaataaatttaataattataattcttgctatccaaggtaaactagaagttctatataatataaagttaactgctgcttctagtttctttctattttctccgtgattaaaactttcttctgcaaaaataactgattgtctaaatacattcacatattgttttctgttgtaaataagataaattaaaatcagtccagctactgctatccatatccattgttccatactaaaacttgctaaatatcctaccacttgattaattaaatctttcataattaaaacctcctattctacatcaaactttttattttcccattttttataagcatccaaatataattcttttttatcaccattgtaagttaattcatagtacattccgtctgaaacatttgtagacaacaatgcttttgcattttgtagagttttgcaataccatacaacgaatacatcatcttttgttatttttactccatctgttttttccactctttcattaaaatactcaaccactttttccttacacatatcttgaaacttattaaattccatactttttacctcctaaatattttcttttataaaattaataaataaattaacaacatctttttccacagaaaactttaaactttcatctggattgctgccaaaaaaaggctcaaccaagatataagtatctttgctattacatattccatagcctcctctaactttgctatcttgaatttctattattccgtgattacctctaattttgctaccaaatatattctgcaacctagccataaaattagttgctaattccttagccttattatttttataataaactaaacactcacaaccattggcttgactgttagtagatgaattaaaatgaagttctaaacaagttttataatcatttttgtttaattcttttaaaacttcttccatttctggaacataaaatttatttggctttctctcatatacatctaccatttctggaatttcagttttaattttttctgctattcttttccagtaatcatattcagagcctactgtttgcgaatatgctcctttacttcttttgttatgtccgataattaatgcaactttcaattttatcgttctcctttcttaaaaattattaattagactttgtaatttgctgttttaagttattaattagatgaagctatataaaactacctctaattaatttaaactctttaaattacattttgaccaatttattatgtatttcttttctcttagcttcaaattcagcttttgtaacttcttttggtgttacctctgttttaaaatagttttctgtatcataaactgattgagtaaaagtttttccaaaaccagctaacactaatgatttctgtaaatctaattctaaaccgaaattatcttcaaaataccaagtgattggtttttcttttccataaatagttttttctgccaacataaaagttacatttgaagccaataaagttatatctttatcacgacatctctgtctatgttgttccccttctacttcataatcaaatccatagtccaatacagtggcttttaaattatctattgtgttaaagtaatctttttgttctctctctgtatcataataccactgttctttttccttattccaagttaaatatttttcattttttttaggcttttctatcttaacaatctttttatctcttataacctctccatcttcaagttgtacttctatatcattttcaactttttcttctcttgtcatttctctaattgtgttaccatttaaaattggataattaaatggtgcatttctttcaactattattgtttcatctttttttatatcaggataatatgaaaaaataacatcccaaccaccatataatttaacttcttctgatgttaaatttacatcaaataataattttggtaatttttcttttgaataaatataaaacataatttgttctcctttcaaatttttagtatttttggttatctattccatcacagatagatttttaaaatgtgtatagattgttccatgtatactcgtgtaaatcaagcaaacgaaggttataatacttggggtccttggattaaatgcagtagttaaactctagctaggctctaaatatatccaatagccattaatgtaaatgctccttcaaaattagatactgtaatttgtgtagttgtaccccaatcaattgaaggagaagttgctccacttgctcctgcattgttatctgtcatagatataaaaggaacatctttaaaaggctcatcaaaatagatagtacatttattatttatattcgcaataacttctgaagatacagtaaattgcataatacaaaatctatctattttcatctttctaagggttgcgtttttacaatttgtgactttacttgttacatctttattttccactttaaataaattttccaatctattaagattttccaaaattgacaaatctataaaatttccatttggcatatgtgcaggtccaccaactttacatttataatatttttttgttagttctgaataatagacattcccaacaacagcattggcaataggaaaatctccatcgtgttttccaagcgctgatacaagtctatcgtttaatccttctgattttttttctgtatcaccttttaatttaacaacataatcttcaatcttatcccataattcattccaaaaatctctaaactttcctttataatttgctttccaaactggcaattttagttcttttgttactttttcaacttctaatctaccttgtggatcttctatccattgtgccatttttacctccttgaaattttaatttcttctaattgacttaattccatttcttcaagttctgataaactatacatttcaatatagtattcatctcttgctaatgtaattttttctatttcttcaagtgtcatttcgtgtaactcagaaattaaataatcttctacataaataccattgataatttctaaacctacacctgcacctttaatttttctaactaaactaaaaacctcttttttatctatcttttcaggaatacttataacaatttttccagataattcaagtattttaaattcagtttcatttaatttaaaatattctgataatattcttacaatttcttgtggacttcctaaaaattgtaataatgttatttcaaactttaataattttctgtactctacatcattaagtccatttctttgaattttaaaattacttcctaaaacatctaataaatagccttctgatttgtctatatcattgaaattggaaattaaattataaatatttcttattctaaaatgcttgttttctgatatttcaaacatttttttagaatatactgtattgtggtatatgtgagggatacgatttaaaatcattgattaacctcaatagttatatcattttcatttgctactgcaacttccttagtagataatttataatcagcttccctctcactgtactttacatctcctaatttaagttttagcgttcttataccacttgtatttttataaatttctccaattaatttatataggtaaatagttccagctggctcaacttcatctaaatattttaaataaatatcttttattacttttttaaaatcttctttccaaatctccttaatagcttcaacttcaactttcaaatatatagtcttttctgttggccttgtaaaacctactgttatttctccgaaattttttgtaatatctccaacagttcttattcctgcaattttgtactcatataatgcttttaagatattatcattagtatctccataacaaatagcttcataactatgtgccaatcttccagcactatcaaaatcatcagtatcattttctataacttggcatttctgtacatttgtattttgaagtatataattttttatcccctctgttgtaaacgaactctttctatctagcctttttaaatatctttctcttaactctgtatcagtttctaagtctttgcctccaagagtatttaacttattatttatagaaatcacaccagttaaaatttcagtttgttctgttatagctcctgcactaacattaccatcagttccagtatttaaggctattacttcaatatttgtttctctttcagttgttgtaatagtagatgtatttaatgttacaaacttaacgcctgatttagtttctacaccccaagcctgtggtatttgtgttccaatttctgctgtaactgtaatcttaccaactgcctttttagctttattccaagtcatacctaaatggcttgttatagcattcaaattgcttccagttgctgtataaactgataactgattaaatgctgataatgcttgtaaataactatcatattcttctgcactatcaaatctaagccaagcaattataatattactgtctgtttctcttaaatctggctttacacttttaaagtcatttaattttcttgtgtatatttcatctattgttggcaatataaaacctttttctgttatcaaattgtgtacacctccccattaattcttatgttagcaaccaaaatattatcttcaaattcaatgctttcaattttttctacaccttcatatttatttataaccttgctaacttcttgaattattctatttttattatctttcaattgtaaaatacctgtgttagtatcatttaagtacggagtcccccaagctgtatttaatgcaaactgtcctttgttttgttccagttcaactctaatagcttgtactaaatcttctgcattacttacaatttcacatactccattattaaatactagttcgcaatctttatctaattttggacttgtcatttaaccctcctaattagcactacttgttgatgttggactttggtcgccaggtctataagtatgtgtatgtcctttaagacttttacctgctccttgtacatcttctgttgctgtaactccaccagttattgatacatttccagtctgtttagtattaccagtttgagttgtattaccatttatagttaaatttccatttaaagtaacattacttgtgatagttgtttcattacttccagcaagtattgttatatctccattacctttaatttcaattctagtgcctttaccttgtaaaattatatcttctgaattatcttcaaaacctttttcacaacttcctataatataaggctcatttaaactaaatctttcaaggcttgtttcatcagataaagcagtttctgaaaacccaacccatacaatatctccaactttacgaggtatttgaaaactccatccaccgaatttaagaaaatctaatcttacatctattaatggaggatagtttataagttgtttacatagttctcttttagcgagaggttgtacagtacaggtcccagcaccataattaactgatgtaattttacaaggtaaacttgtatgcaattcatttaaactatcatctattaatgcttttataacttctatcattaaaccacctctactgttgccattgcactaaatgtttcaagaccacttgctgaaaaatcacactctttcacaactacttttcctttaaaagttgtgctttcaatctctagtaattgtcctatttttataagtggaattagcaaacattcaatatcaaatttttgtttgcctttcccagatgttttattattactttttttcttgcttttactatttttattgactttcttttcatctttttttatttctgccttatccatttttttatctactcttataagtccctgctctcctcctaagtgaataacacttgaataaactttattaggtaacttaaattcaatagttgtattggtaaatcttgctattgttcctgtatctcttgcaagaataggtataacatttgataatcttccactaaataccttaccatttggatatactatatcttttcctaattcttttatatccatagtaaaattacacattttttcaatttgctttataacttcacttgcttttatacctgctttgaactgtctgtttataatagtatttgtataagctctattatttggagttgcttcaattgtagttatgaaatcattctcatctcttgaagttgttatactttcaactatcccattaaaaataactccgtgcaattctctatatcctgcatctattgatacatcttgattttcttttaatttttgctttgttgtttctgataagttatatagttttattgttgctatatcactcttattatcatcagtacatttaacttcaaaatcaatgtctagctgctcataatcaaaaactaactctcctattgttattaatctaacttgcttccataacttcgccatcttcatcacctattaaaaagaatttatagtccttattcagattttgaggagtaattttatctttttcttctgcaaattcattaatttttatacatcttaattgaagattagtttcattccttactaaacttaaaaaatcaatgttaggtactaccttattaaaacctgttatcctttgatttaagccgtctaaaattgataggtatataaaactatcataagtattataaattagctctaaattaatattattaggtaattcggctattattcctctactctctatatctgttacatcaatttctattgctttcataaaatgctcctaacctgctaatgtttttataaaacttttatctttttgctttgttgtattagtaactttattgactttacttttttctgcacttgttggagtgctaaccttagctgttgttcttttctttttgccacctgatgtcttagcttttttactatccatttttacatcagtttcttttatctctccgacttgaatttgtcttaaagttatatagtaagtaaagccaaatttttgctctcctgtttccatttcttcaatattttcaattatcatatgttcataagtgtctctattagaaaaaacaaactgtacttcttctcctaattcttgcaattttaaaagtttatctctatttaataaataatctctgctgttatctacaacagttatattaattatcataggctcttttctaacactatcacttatattaaaaccattctcaactcttttagttggtaatgtcattggtaaacttcttgtcttttctgatataacttcaagtggtatatcttgtatatagctttgattagagttttccagcatacttaaagccatatcaactgcttgtttgaaaaaactcatagtatcctcctaatatgtaagacccattcctacttgtgctttcattctttctaaattttctttatctttttttagtaaaaaattcactatattttcaaaaccatttttcccatctttactttcattaattgttacatcagttttataagtagggttataattaactgtttgattagctgttactgcttttttagttctatctataactttattatcaaaagttttaggctcaagcaatttattgaaatcagtaataatgccagaattaacaggttgatatggtattacaaaatctttttcaactggcactccgaatatattttgatttattctcctaaaatcagctgcttctgattgttgttttattttcttttcagcttcatcaagtaaataactatcgtgcattgcactagtttcattcatatgttgtccagcactatataatctattccaaccacctttcagatttccatatgaattatcccaattcatattttcaaaatcaccagttaatgccttatatgtatttttcccgaagtcccaaactgcaccaactgttccaccccatatcatttgtaaaagtcctgctccaccttttaaagtatcaagcaaatcggataaaacttttgttgtaagtgttatcttttctattccactatctgctccctcagtccataacttccaaaaatcagatacaccttttcttaaatctgaaaatctataatcagtacctgtaaatttaagtaatgcatttatagcgtcctctgtaaaactttctttaccttgaaaggctgcaaatacatcttcaatagcacctactaatgcaacaagtggaaattgtgtagcaaggaatagacctcctataacttttaaacctgttttagctccgtctggtaatgcattaaaacctcttttaatatctctaaaaacacctataaaagtatctacaaaacttccaccagctttgaatactttggtaactaaatcttggatgccatcagcattttctgcaataaattcccaaaactttgctcttgtatctcttatagacattccccaagtttcgtataaatctcctattctatttttggcatttatgattttaccctcaggagtttttaaaaattctttattttgctctcctacacttcttcttactgcttctgcaagtagagcaactttttgttcttctgttcctacttttaataattgctcctctctttctgataagacaattccgtttctttttaaaaccattgtttgaccattcatagctttggcaaatatgctggcaataccttccatatcttgtcctgtaccatttaatcccttttcttttacaagcatatcctgcataactggcaataattttttaatactgctttcttgcattctaaaagttgccaatctttgagcaccagcaatagttacttcatctccaacaactcctaatttttgtaattctcctgtcatatctataattgattttatttggtcatctctaaaattttgagctcttagagtgttatataacttagcttcttgttctatttgatagttacttgcttcaactgccttattatattgacctacaagtgcacttattgaaaaataacctattgctaacttccctagtgtacttcctgttacttctttaaatctttgactcaaactcatagattgttttaaattagctttaaattgtttaaaacctgttgaatttaaaaaagtatttatattaaattttaatgctccaactacactcattactacacctcatttatttttgaaattctatctaaatattctactaattttttaattgaataattttcagctctttcaaaatctcttataaaataaccatatacagttatcattctttctatactttcaacattataatttaagttacattccacgaaatgtattcataatgaaaccacagaaagctatatttttcacttgctcccaaactgatagtcctatttcttctatttctttatatttgtaattatctatatttttatttaataatttcaaaaatctttctcctgtgaatacaacactgtctattccagctaaaaataactgttccattgtgtaaataccattatcatcaagttttaactctaaatcattatgttttatagcttctggtactcctataatatcctctaattttggattaactccactaggatattttaaaatttcttttgtataatcaactattctagttctaccaattcttttttctaagttaagaacataacttgctggttgctccattacagttacatcaaaattatttactttaattattttcttttccattctatcctccaaaaatagagtagtaaaaactactctattaagctaattttaaatttatacattgtatttcccattcaaaagcttttgcatctgctcctatttctaaattaggtattttcttaaaaaagccttttgctgaaaaagctcctaatgttccatctaaacctttattgataaaagttacagggaaagtccctttttctccatctgttaatgctatttgtttaaaacttaaattcaatggtgaattttgcaataccttaaactttataactgcatcataatca

SEQ ID NO: 7 - DNA, 39375 bp, Artificial sequence
  bacteriophage genomic nucleic acid sequence
taaaaaaagctgttccactgtcaacaataagagttaccatacctgcaattttatacactcttatatctgttgcattagttatagataatttttcactttctaatcttgagaaattttccaatctattaagattttctaatatagacatatctataaaatttccatttggcattggagcagggcccccaactttacatttgtaatatttctttgtaagttcagaataatagacatttccaactactgcatttgtaataggaaaatctccatcatgctttccaactgctgatacaagcctatcatttaagccttttgaattcttttctgtatctccttttagtttaagtatgtaatcctctattttatcccataattcattccaaaaatctctaaatttacctttatgatttgctttccaaactggtaattttagttcctttgttactttttcaacttctaatcttccttgtgggtcttctatccaatgtgccatttttacctccttgaaattttaatttcttctaattgacttaattccatttcttcaagttccgataaactatacatttcaatatagtattcttctctcgctagtgtaattttttcaatttcttctaatgtcatttcgtgtaattctgaaattaagtaatcttctacataaactccgttgataatttctaaacctacacctgcaccttttatttttcttactaaattaaaaacttcttttttatctaatttctctggaatacttataagtatcttcccagatagttcaagtattctgaattcttcatcattcaatttaaaatattctgataaaattcttataatttcctgtggacttcctaagaactgtaaaagtgatatttcaaaattcaatatctttctatactctatatcatttaaaccatttctttgaattttaaaattacttcctagtaaatccaataaatagccttctgatttatctatatcattgaaattagaaatcaaattataaatatttcttattctaaaatgtttgttttctgctatttcaaacatttttttagaatatactgtattatgatatatatgcgggacacgatttaaaatcattgattaacctcaatagttatgtcatctgatgtagcaactgccacttccttagtagataaaatataatcagcttcccgctcgctgtattttacatctcctaatttaagttttagtgtttttataccacttgtatttttataaatttctccaattattttatatagataaatagttccagctggctcaacttcatctaaatattttaaataaatatcttttattacttttttaaaatcttctttccaaatctccttaatagcttcaacttcaactttcaaatatatagtcttttctgttggtcttgtaaaacctactgttatttcaccgaaattttttgtaatatctccaacagttcttattcctgcaattttatattcataaagagcttttaaaatattttcgttagtatctccataacaaatacactcataactatgtgccaatcttccagcactatcaaaatcatcagtatcgttttctataacttgacatttctgtacatttgtattttgaagtatataattttttataccctctgttgtaaatgaactctttctatcaagtctttttaaatatctttcccttaattctgtatctgtttctaaatctcttccaccaagagtattcaacttgttatttatagaaatcacaccagttaaaatttcagtttgttctgttatagctcctgcactaacattaccatcagttccagcattcaatgctattacttcaatttctgtttctctttcagttgttgtaatagtagatgtatttagagttacaaacttaacccctgatttagtttctacaccccaagcctgtggtatctgtgtcccaatttcagctgtaactgtaatcttacctactgatttttttgctttattccaagttatacctaaatgacttgttatagcattaaggttagttcctgttgctgtataaactgataattgattaaatgctgataatgcttgtaaataactatcatattcttctgcactatcaaatctaagccaagcaataatgatattactgtctgtttctcttaaatcaggctttacactcttaaagtcatttagcttccttgtgtaaatttcatctattgttggcactataaaacctttttctgttatcaaattgtgtacacctccccattaattcttatattagcaactaaaatattatcttcaaattcaatgctttcaattttttctacaccatcatatttgtttataaccttgctaacttcttgaattatcctatttttattatcttttaattgtaaaatacctgtgttcgtattgtttaagtatggagtaccccaagctgtatttaatgcaaactgtcctttgttttgttccagttcaactctaatagcttgtactaaatcttctgcattactaacaatttcacatactccgttatcaaatactaattcacaatctctgtctaattttggacttgtcatatttccccctattctgctttacctgttgaagtttgagggtctcctcctggattatatctatgtgtatgtcctttaaggctcttgcctgctccttgtacatcttctgttgctgtaacttcaccagttattgacacatttcctgtttgtttagtatccccagtttgtgttgtattaccatttatagttaaatttccatttaaagtaacattacttgtgatagttgtttcattacttccagcaagtattgttatatctccattacctttaatttctattctagttcctgcaccttgtaaaattatatcttctgaattatcttcaaaacctttttcacaacttcctattatgtatggctcatttaaactaaatctttcaaggcttgtttcatctgataatgctgtttcactaaacccaacccatacaatatctccaactttacgaggtatttgaaaagtccagccgccaaatttaagaaaatctaatctcacatctattaatggaggatagtttataagttgtttacataactctcttttagcaagaggttgaactgtacaagtcccagcaccatagtttattgatttaatttcacaaggtaaacttgtatgaacttcatttaaactgtcatctattaaagtttttattacttctatcatcaaaccacctctactgttgccatagcactgaaagtttctaaactacttgctgaaaaatcacattcttttataactaccttacctttgaaagttgtactttcaatttctagtaattgccctatttttataagtggaattagcaaacattcaatatcaaatttttgtttgcctttcccagatgttttattattactttttttcttactgctacttttactatttttactagctttcttttcatcttttttaatttctgccttatccatttttttatctactcttataagtccctgctctcctcctaagtgaataacacttgaataaactttattaggtaacttaaattcaatagttgtgttggtaaatctacaaattgttcctgtatctcttgcaagaattgggatcacatttgataatctgccactaaataccttaccatttggatatacagtatctttgcctaattcctttatatccatagtaaaattacacattttttcaatttgttttataacttcactggcttttattccagccttgaattgtctatttataatagtgtttgtataagctctattatttggagttgcttcaatagtagtaataaaatcattttcatctcttgatgttgttacactttcaactattccattgaatataactccgtgtaattctctatatcctgcatcaatagacacatcttgattaagttttaatttttgccttgttgtttctgataagttatatagttttatagttgctatatcacttttattatcatcagtacacttaacctcaaaatcaatatctaattgctcataatcaaataatatttctccaattgttattaatctaacttgtttccataacttcgccatcatcatcacctattaagaaaaatttataatctttgtttaaattctttggagtaataaaatctttttcctcagcaaaatcattaatttttatacatcttaattgaagattattttcattccttactaaacttaaaaaatcaatgttaggcactagcttgttaaaacctgttattctttgatttaagccatctaaaattgaaagatatataaaactatcataagtattataaattagctccaaattgatattattaggtaattcagctattattcctctactttctatatctgtaacatcaatttctattgctttcattttttctcctatccagctaaattttttaaagtgcttttacctctttcttgctttttgcttgtaactttattaactttgcttttttctgcacttgttggagtgctaaccttagctgttgttcttttctttttgccaccagaagttttagcttttttactatccatttttacatcagtttcttttatctctccaacttgtatctgtcttagagttatatagtaagtaaacccaaatttttgctctcctgtttccatttcttcaatattttcaattatcatatgttcataagtgtctctattagaaaatacaaactgtacttcttcgcctaattcttgtaatttcattaatttatccctatttaataaataatctctgctgttatctacaacagttatattaattatcataggctcttttctaacactatcacttatattaaaaccattctcaactcttttagttggtaatgtcattggtaaacttcttgtcttttctgatataacttccagtggtatatcttgtatatagctctgatttgagttttctaacatacttagagccatatcaactgcttgtttaaaaaaactcataatctcctcctatattccataattcattccaatttgtgctcttattttttgctcctcttgctctttatagtttctcatttgtgtatcaaacatattcttaattttttctccatcagtagcctcattgattacaaaacttggattatatttttgattattaataatagttatatctggctttactacttttttgttatcatctataactttactatcaagacttttagtttttttagcttcatttaaattgtttatagcttcattaatatttgttggcaattcaacttttatagcttcgttatttttcttatattcatttacagtggaattatatgtatctttcttatattcattcattgtagaattataagtattatttgatgtaaagttaggaacagatgttgaaattcctaacagctggcttcctggtattgcaaaatctttttcaacaggcactcctgtttttctttgatttaatcttctatattcagctgcttctgattgttgttttattttcttttcagcttcttcaagtaaataactatcgtgcattgcactagtttcatccatatgttgccaactgccacgtattttactccaaccacctttaatatttccccatgaattaccccatttaaattcttcgcctttaaaaagtcttaaaacgtttccttcaatatctcttactaaaccaccactaataccaaatgtcatttgtaaaaaacctgctccaccttttaaaacatctaataaatcagttaaaactttagttgtaagtgtaattttttctattccactatctgctccctcagtccataacttccaaaaatcagatacaccttttcttaaatctgaaaatctataatcagtacctgtgaattttagtagtgcatttatagcgtcctctgtaaaactttctttaccttgaaaagcagcgaatatatcttcaacaacaagtcctaatgcaaccaacggaaatttagtagcaagtgctaaaccccctataacttttaaacctgttttagctccatcaggcaatgcattaaaacctcttttaatatctctaaaaacacctataaaagtatctacaaaacttccaccagccttaaaaaccttagtaactaaatcttgaatgccgtcagcattttctgcaataaattcccaaaactttgctcttgtatctcttatagacattccccaagtttcgtataaatctcctattctatttttagcatttatgattttgccttctggtgtttttaaaaattctttattttgctctcctacgcttcttcttactgcttctgcaagtagagcaaccttttgttcttctgttcctacttttaataattgttcctctctttctgataagacaattccatttctttttaaaaccattgtttgaccattcatagccttagcaaatatactggcaataccttccatatcttgtcctgtaccatttaatcccttttcttttacaagcatatcctgcataactggcaataattttttaatactgctttcttgcattctaaaagttgccaatctttgagcacctgcaatagttacttcatctccaacaactcctaatttttgtaattctcctgtcatatctataattgattttatttggtcatctctaaaattttgagctcttagagtgttatataacttagcttcttgctctatttgatagttacttgcttcaactgccttattgtattgactcacaagcccacttattgaaaaatagcctattgctaatttacctaatgtactgcctgttacttctttaaatctttggctcaaactcatagattgttttaaattagctttaaattgttgaaagccttgtgaatttaaaaaagtatctatattaaattttaatgctccaattacactcatcacattacctctttatttctgaaatatattcaatgtattttttaagttctttaactgaataattttcagccctttcaaaatctcttataaaatagccatatacagttatcattctttctatactttcagcgttatagtttaagttacattccacgaaatgtattcataataaaaccacagaaagctatatttttcacttgctcccaaactgatagtcctatttcttctatttctttatatttgtaattatctatatttttatttaacagttttaaaaatctttctcctgtaaatactatactgtcaatacctgctaaaaatagttgttccattgtatagatacctttatcatcaagttttaattctaaatcattatattttatgctttcaggtactcctataatatcttcaagttttggattaacaccactaggatattttaaaatttcttttgtatagtcaactatatgagttctacctattctcttttctaaattcaaaacataacttgctggctgttccattactgttacatcataattattaactttaattattttcttttccatatatcctccaaaaatagagtagtgaaaactactctattatgctaattttaaattaatacattgtacttcccattcaagtgccttagcatcttgccctatttctaagttaggtattttcttaaaaaaaccttttgccgagaatgctcctagcgttccatctaaacctttatttataaaagttacagggaaagtccctttatttccttctgctaatgccatttgtttaaaacttaaattcaatggagagttttgaagtattttaaactttataactgcgtcataatcattatgttgatttatacttctagctccatctataccttttgttattcctttaaaatcattatcatattcaatagtgatttttgtatcttctgcatagtcttcaactcttgttttacctattattaattcatagtttttactgtcgtaattatatatattagccatttatagcacctcctaaacttcaaagaacaaatctgctgataattctctaataccataagcataataaactgttatttttacacctgttaatttaccatttaaaatatcattctttggtatttcttcaagtggcactatatcaacaactgtcttatcttcaatcaatgctttcattctttcaaactgtttacatctagttaaaataactgctttcaatgggtctacatctgcaaatgtaggttttggagtagcttttaaatataatgtaatatcttcttcaagtctaaattgtaaagccttaacacagtgaataaagtctattgggtcgcctgttacagttacaccattagcaattcctagttgtcctttcattcttgctacatagttagatttattcttgtctaaaactccttgttctgctccacttattccactttctactgctccattgattaacttattggctatcaatacacttccggggaattgtggtattgaatatcctgcaactgctcctgctattaattcatcatttttactgaaaaataatgatgttgtatcttctgcaatagcttttattttagcttctgctgtcataatatctgtatctgtttttacttgtgcaaataacattttttgtcttgctccaatttcttttgatattaaaggtattttttcaatatcagtttcatctgttacagttccaaaccagtcatttttaacactatcaaataagtctttgtaattgcttccagttactaccttaccaaatactaatacttgtttagctcctgctgtaaatgctgcttgtaatatcttataaacatcatctgttgcagcaactcctgttacatcttttatacttgttattaattgctctttaatggctttcttagtactaaataccccaattatattaactgttgcttgatccactggacttggcttgtgtgtatttaaaaatactattttcttttcagcgcctaatattattcccattaattgcctcctttaatttcaaaatctacttgttttataatttctatttctgttcttaattccttagaagttcttaccactatatcaaatacatatctttctaataaatcactagctgtataatctgtaatgtcttttaactctccaacttcctcaataactaagttcaggccatttaatttaacccaccaatttatagcttctatattagtgaaataatctctaattattgctacatctgcataactatctttcttatttagagtaaatgaaaaacttattatatgcttgtttatatttgtttgcttaaatactccgtatttttgagtatcttctctttcgtttgtatatctatgaataacattattagaaatagtccttgctattactcttggtaatttcagttgcccatttacttttgaaagatgttcaaatggtataacttgaaatttattatttaattcttttattttgtccaggaacaatatttctaaatctatgttattcatctttcatcatctccaacacaaactcattaaaatctgcatataatcttggtaataattcaactactctataattaatactttcaactgttataatatctcctagtcttaatccatagcttttaagtatctttccgttaagttgatttaaaactttaattgctgaattaggatctgctgttgctacttttagagttttcttataaataatcatatcccaatgataaacttcttttgctccatctgggttatgcatatcatattcagattttctagttacctgatattttcttaactcattttttgcaaactgtgataatttaaatttcattttaaatctccttgactatatactccaagctattaatcattgtcctagtatcaattaaaggctttgaatctttcccttttctttctcttgcttttatagtgctttctgcaagttctgcccagcttcctttctctatgctttttttaatatattgaactatctgttttcctatatcttcaaaacattgcttggcttgcattttgccctctgctacctgtttagcattatgaataaatctattcattattttttgcatattcgcatctattgctgttctccaaaatggtcttgcaggataatgaacattaaaaccctcatttccatactcaagccacattgctattaattcaactttttgtccattttcttctgtattatcttcattgaattgcacaactaatttccattttgctaatagatttaattgcttttctatctctgcaaatttcttcaaactttcagttgtaaattttacattaactccaatcataagttttcctcacatatttatagagaatagccttagcttgtgaacttgcaaatatagttgtccctatcttattagcaccatctgctgcataagttattgacatatcacttattgatttactagcaatacctttttcaatatcacttgtattgtcatcatctaaatctttaattattgaatatgcttccagtatctgtgcttttttaatttcatcaggtacttttgattcattaattctagggaatattaattcttgtgtatctgattttccactatctcttatacataaactttcaattttatctaatgctttatataagccttttgataattctgtatctgatacttccccgtatctattttttataaattcttttgcctcatctaaactaacataacctattatcattcagcctccttaaaacaaggggagagcttttaactctccattatgcttgtgatatttctaattcacatagtaattttgttttacctgtttctgtttccataacatcacaaccaaataattgtaatccttttacatattctccgaatgatttttcaaatcttccagcttccattttgtttatttgcattgcaagagttaatccagcacttactcctgccatacagtgatattttttagctgttctttgtacattgttagatttatagatagtaaatcctccccagcttccaataaaatagctttggttaatacctaatgtgttttctccttttgaaattgttggaacttcttttataagttgcccataaatttcaggtgaaattacaagccatctatttgcagtagggacattgtcttcgtccatttttactgctaaatctataattttatctgatactttatcagtacctataacaccagcaactttgcttttacattttgcatataatttagcaagttctgtatcaacaacatctgctatttcataaatagcttggtctgttaatgtttccattactcctggtatagcttgtgccttatcaacatcatccatttttaaagcgaaatacttagctttattaatagtgatagtttgatatgctcctgtatcttcttggaatgttatatctgctcctgtataatctccaacagttactgagccaatacttggcactcttacagagctacccatattttctatttttccttcataatttctgtttgctaatgcaccaaaaactaattgcttatttaagtttctatttgttaattctgcccatacttctggtttaaaagtttgatatgacatatttatatcctcctatttttctcttaatatttcctttaattgttcatctgttaattttgccttttctaaatctgacatctttaaaaagtcctcataagtaacttttgaattaccattattaggtggtaatggtggaggtgtttgacttcctttatcattaaataaatctggataagttgttttgaaatttgcaacttgctcatcaaaacctgtaatcttaccatctttaatatctaatttagaaaagtctactgcattcacaagcattgaactatatttaggagaaattgctcctagtccaaaacttactgctgttttaatagcttcttttttataatcttcaaaactatttttaaatactatttcttttcctaaatcatcagaagttaccttatctcctaattttgattttaagaatttaatagcattatcattatacagtttatctgataggctttgatttttacttataaagttagttactgcctctgctgttaaaggcttgtctacttcctttactgtttcaatcataaacttgttatcagttagccatttcttaccctcattacttcctaacattttcttttcttcatctgttaatattaatactccgtcttttaattccattattttgctcctctcgtgcaattgctcacacaaaattaatttaatctaataggctcagcccaacatctacaattaaaatcttctcctggcaattcatcattgatactaaatactaagccctctcgttcagcgtgttctggtctaactctatcatctttcatagtgtgccaaacaaaatgctctataccattctcaatcattaagtctttacattcttgtgcatataaattacctgtttcatttcttgcaagattttcattccttctgtttagccatttttgtaaattattaatatcattttgagtatatgttccattttctatactcttaacaatatctttaatctctttactggctctgttatttgctatatcttgcttcaatgcgtttaacgtagactttggtacttctccattttttaatacatttaaatttctattataatttttaattgtatctattatcctttgttgccttatatcaattaacttatcagctgtaactgatgtattattgaataaatcataattcttttttatccagtatttagcaccagttaaatcagttctttttaaatcttcatctgttaaagttcgccaactttcaaatgttgataaattaacatcaatagcaacttttgttaattcttttataatgtttcttttttcttcatctgttaattcaaataatggtaattgtccattacttacgttttttcttgctcttccaactcttttttttgtataaaattgaaatattattcttaatctattttcttgtgctaatgggaacatatattattcctccttaacttcaagtcctaaatctttcataatgtcttttgaaagctcctctaatttaacttgtaattgttcttctcttgttattccagcaagtatattcattatgttaattagcttttcttgatatgttatattagtttttattgatcctatttgtttatctggctcttctcctaaaatacctaaaaacttgatagctgtttctaaactaattagattattttgaataccttgtaccacaatagccattttttcagttaatgataaacttaaaatatcctgtgtttttatctgtaaatctatttctttaccttttaacttcttatatccccatagaattatatttttaattccagttatacacttagtccttttactctcaactgtggcgatagttctttctaaacttcttcttttagcttctccacttgatatacttccacctaaatcaattccaaaagctaaatcattaactcctagttgtttataaatatcatttttgatgtcttccttgtgtaatttccattcttgcgtttttgtttcaagttgaacttgtttaacttctttatcatctttatttactacaattactcttccatctagtcttacagtactacgaccgtttttatcaatttcaattacgctgtctggaacttgcaacaatggattagcaactttttgaaatgcttgtgatgttaaagtatctccaattactaactctcttacatttccaactaaatcgtcattataatcacttttaccgaatatattttctatctctactactgcccaaccttgtgcttgtttatctctataaccaaaaccatctggtatcattccattaatttttaaatcataaggataaggcaattcttgtatatttttatctgttatcttatatgctctatattcaatactgtctagctcataaatttcacatataagagtttttttagtcttatcatcttgtgataagttataaattacataaccatcaattagtttaggattatactcattcctaattgggaaataatcttttggagtaactgtataaaaactaaatttatctaattgtgtaactccctttaaaagtaacttaccagcccacgattgaataaccatagtcttagccagtaaatcatctaaatcaaaatcttttataagttcaaaatctttctgattagttactagattcttacttgttgcatactctgcatataaccttgttgtcgcttgtaatatcccattacctacaactaaatctttaagactatatcctgcactatttgtttttaaacctttattatcaaaaaaataagattttatataacctttattatctactattcccatatactccaaatttactcttgcttttacatctgtaaaaaatacatctgcacttttaccatctgatagcttcctgtatttttcacagtttttatgaatatcagtttgtatataatcgttatatgcttttaatattctttctttctccattcttaaactcctattggcttttttatttctccacttttaaatacagtagccttatacttttctagtccatatctcatagcgtccactgtgtgtgggtctattgtgaacttgttttctaagtaatttccgttcttgtctttttcgtggcataattctgttaattctctatatgtgtttttacatttatcagaaactataatcttataaaagctccttaatttctgtaaaccgtctaatatacttcctgcacctttttcacaactaattattttaaatcctgctcttctaatttcttcagttgtttctggtcttgcattatctgcaataatctctctatgcttgtttttaataggttttaaagtttctattaattcacttgtaattaattttttgttatagacttcatcataaatatataaaatgttattttctctatctaacgccattctaaccaaagcattatatgaaaaactaaatccataatctaagccatcatataaattacctaatccatatttactcaattctttaactattgcttgtacttctgtatcactagctttttgaatatttgtaaatactctttctcctactattccgaatcttccttgataggctattctgtatctttcaatgtcataagtttcaaaattctttaattgctttatatattcatcagtaacaaaagcattgtcctcaacaactgaatgatgataataagtatcatctgttgtcataatcctattttgataaagttcttcttcatctattcctgcttttttaataaatctttcataagtccagttattaatactaactgggttattagttaagaatatatgtaagtcttttcctaatgctcttaatcttccatttaattcattaaaagcgttgtaacttacttctgaacattcttcaatccaaatcatatccacattatcaatagattttaatttttcactatcatctagtcccataaagataaactcgctcccattccttcctctaatgtgtaaagggtttgttgtatatgtgaaaaagctatttaagctgtaattactgataattccttttaataatgaaaagcaactttcttttatagtcctataaactgctctaactactaatattcttcttttctcttgcaatgcctttaatattagttttaaggctgtatgatatgatttactgcttccatatcctccaacgatgtaatagaacctcttatcccagttatttagataatcaataaaatgctcgttagcttgtatattaatttccatttcttttaactccattaatcgttatagatacattattgtcttcaatatctatgtcttgcttgtctttccatttacttgattttctattctttaaccaaaatatttgtgctcctacatctcctgccatttcttttgttacttcttttatataagtgcttttctttccatctatttcttttacttcttttataacttctttatatttatagcctatggctcttttaaataaagcattttcaacttctatatctgcaatttctttacctttttttaaaactgccgaaaatgccgaatatttgtttttatattctctaaatgttgaatatgctatacctaaatttttggctatctgctcatctgttaatccatctcttttccaagcctctatttctaaaaatctaggttcaacttctgtttcgtatttacttttagcaattgttatcacctctttaatctttttctatttcatttataaaatcatcaatttcattttcgttataaaattctttgaaatatttttttatatctttaacattccctttgtaaaaaattataatattttgatgtatttttgaaatttttctagttgcgttaaatgtgcgtcctgctctaattactgcactccctaatggttctttgtaaataatatggttataataatttagtccagcatttttaaaagcctttatagtatccccaacaaaatctattagaactccatttttatctctaacatctccaacaacaaaaattgcaaatctattatcttttaattttttacaatgtttttctatgattatattgtatttaataataaaattttcatattccatatttgataaatcattttcattgttgctgtatacttctaaatctaaatatggtgggcaactaaaaattaaatcttgtgtaccatcatctatgtatttgtcaacattttcagaatcatctaatataaattttggtaatattcctaactctttggattgctctatattaacatctatttgttcttttctaatatcaaatcctgtatatttatagcctaataattcagctactgctcctctaattacacccccacaaaaagggtctaatatttttttggtttctatatctttattaggtaaaaaccacttataaaaaacttcacttatagcaccatcaaataaactagttccatatatttcgcctattaattctttacttctaccttttaaactattaatgctttttttccatttattttttatgctcaaccaaggttctttcattgaatttataactgtaaatggaggcactataaattttttaattaaattccctttctgttcttcttctacatctccatatttatcaagtaaaagattgctagaatttaaaatactatcaatttcaccatcgctaaaacctgttaaacttaaatcaaaatcttctacttttaaagcatttaactcatactgtaatctgtctaaatcaaaatcagtattcattgtagttttattgtgtgctattatgtatgctctttcttgagcttctgtaagtccagttaaaacaatacaaggtatttcagttaatcccaattgtttagctgctaataatctcccgtgaccctctatgatttgattatctgtatttattgctattgggtcattaaatccaaattcttttattgaattggctatctgttcaatttgccaatctgggtgttcttttgcattgttttcatattcttttatgtcatctatatttttattaattatttttaactctttcattatttaccttcttttttgtttttctgctaaaattctatgcctataatttggctctaatttttcaactttattaagtaatttcttatcattaaaatgctcccagtatatagtgccttgtgctaagtttccaaataaaacctgtccttcaatatctttaaatcttgttatttctttggagttcctatttatgtttaaactttcttcaaccgtttcaaattctaaatttagtcctagtaccttatttaataaagttgtatgtgtatctatatagcttcctatatataatttacctagtacaaataatactggcccatctctgaagcctatatcaaaatgttttttatatgttttcattttttctccacgaataaaataaaaatgggatatacaaaaagttagtctaccttggtaaactttctttttatatatcccatctactttaataaaattttgattgtaagatattttattatttaatttttaaaaattttttacacttttttccattgatattattggacttttttagttctacaaaaaatatttaaaaaaagtgttgacatacttgtccaagtatgatatcattaaagtacctcaagggaaaggaggtgataaaatgaaatttcaatttataattgtgattgggagctggtcactaacaattacaattactaaaaaggaaaagtaatttatcccccctcttctgaggggtaaaactaagagtgataaactctaagccttagctacttagattatatcacttcttaataaaaaaatcaataataggagtgatgaaaaatgagaattttatcaaatttaacagattggaacaactgaaaaaaggtaactgtttatgaagaaggtaggaaattatatgtttctgataattttacaacttttggagaaaaaatagatatagataaatggttatctgtttacaaaatattttttggagaagatgaaacttttagtttaacaaaatcagaaaaaaaacttttcaaaatgggaatttataacaattagttaaaggaggataaaatgaaaaagataacaagaaaaataataataaatgctttaaaaaataatgaaattaaaatagtatgtactcacttagatagtgggtattgttcacaggttgaagtaccatttacagttaaaggagaatatagagaacatttaatcagaatgtataatcaaaataataaaatgtttagagtgcaaagcaataataaatttagttgtctatatgatgattatataattgaggggtaaaaagcccctcataaatacaaggagggaattatggaagaaaaaagaaaagggtataaaacccagaaacagcaaaatgaagctaataagagatacagagcaacagaaaaagggaataaaaatacaaagcatagtacttataaaagccgtgcgagagtttttataaacgaaatggcaacacttgaagaattagaagaacttgaaaatttaataaatattaaaaaactaggaggaagaaatatgaataaaataatagttagaagaaggaaagaaaataaaaaaggtggagttatagaaaaatataatattactgagagtgctctaaattctttgatgaaagtttatgaaatactagataataaatattttgttgataaaaacaagttaaataattattttggcgatattaatagcgataattcaatgttttcaaaagaggaatgggaaagtataaaagagatatgtaacgaaggtaattatctaaatggaaatttatactttataggcataagagaaaaagaatatatggaaaacatttgtagcttttttaactctaaaaattggctagaaacagaaacatttgatattgaggctgatatctctattcttagaatctataaaggaaattatgagctattgaaagaaaaattatcaaaagaagaattagaagaattagaaagaataatagattttataaaaattgataattggggtatggattttacaatatctaaataattaaaaaataaaaagatgagtttttaatgctcatctttttttgtatcttcaatttcttcaagaattttttttatctcatcattttcataccttttattcctagaaaaaattattattcttttgtctttaacttttattctatattctccgtttcctaaatgatgtattaattttggtatatgttcaattcttattaacctcattactgcaactcctcaacttctactattacacctttaaattctttttgtttctccataataatttgctttacaaattcatcattatcatcatttagcaacttgcatttaactagactatcttcaatcattttaaacaaatagccgtgattagatacatctaattcagaattaaaagacattttaattttgacaggcttttccagtggtttttgcatacctaccacacttctaacaagtagccatatttcatctttatctttttttctcttagcccaatgcacaccagcataaattttattaaggctaagatgttttttatctatgtttattggtattttgtatattagcttcatctcatcacttccataaaagcattgctattgaaagagcttctacaaatattaatacaccaaagaaaaagtttaaattttccgctctacttaatttatcatcttttttataataactatcattccagtatttagcatgatttctataatattctttttctttctctgctttctctcttttttctccagcttccttagcttgagttatataaaaaattctttcagcttctagtttctcaaatttatcttttaaatttgctttttctttgtttttggctagcaaattattatttaaaatttcaatttcctcttttaagtcatctatctctttaatataagccttgttgtcttgcttcttatgtcttaaatttttgattagatttaaaagatattcttcgcattcctccttgctatttaatttgctagcattataagtaactcctgcctctttattagctcttgttataaatcctctgtaataatctcgcattgtcatttttttatttaccatttggtcctcctatatttttaattttcttttactttgccaattaaattctatgtatttgcacattatttatatttttttaaaaatctttttcttattaaatctttataacattctttaaaataaccaatttcttgccaatcaaaatatacttctatattttcagcagttaaatcttttgtataatttttgagatcctcagttgaatatttccaaccacgtaattcattattcttaattctgtaaacaatttttttattagatattcttttgatttcatagaagtatttattataaaaatattgttgtaatgttttttccttgttccatcctttaagcaaatatttaattcttagatatttaaaattttttttacattttttatctaaatattctaaaaactcaataaatataatacacacagcccaccagctcaaaaatatcgcttttaattctttattaataaaaaatttatatacatttttgatttttttatattttttcttgtattcaagataatattttatttttataaatagccatataaaaaaagttaaaagacaaccaattaagtagatgtaaaacagttttattaaatctattgttattatgaatttcattttgcttctccttatacttcaaaaaatgtttgatttttcttatagtactcatatttcattactccaagttgtccttgtctgttcttcaatatttgtactttcataagttctttatattcagttgttgttggctctgttgtaagtcctaagattgttgaggcatcttgttctatttgcccactttctctaaaatctgcaaggtaaatatctttatcagctcttttttcaatttcccttgataattgagatagtgcaataactgctatatcatagtcttttgctatttgttttagccttatagatacatccgttatttgttcatatctgccagatttattagattttaccaactgtaaataatcaacaactatataatcaagcccatttatttctttttcattcttgatatactcctctaattcatcaattttaaagtttccatcataaagcactaaattactttttcttagtagttttttaaacaagacatttacaacctctttttcatctgctgttagctccttaaatttttctttgtttgtcagtttatctagttctatcctagtttgattactaataattctttgaactatttgttttagtggcatttctaaactgaaaaataaccctcttgaaaatttagccatcataattgctatataaagagcaaatgcagatttccctactcctggtcttgctcctatgatatgtaaatctctttttgtgaattttaaatatttatcaagtctaaatttaccagtcttaactgtttcattttcttctaaactctcataaaatagactttcaagatttttaatatctgcaactttaacactcttatcattttcttttacaacttctgaatgcaatttattgattttctcttttatcaactcatttggagtgttagcaagttctatgatacagttcttataatatctgttttcaagcaccttagtatatttgtctatgttttcttccaatactacaactggtaattcaaaagcctcagctaaaaaacttttatactctttttcttccagcaaactatcaactgataaatctttcatctcataagtcttatatttttttataaaactttgaactaaactagaaaaatatttagttggaatactcttaattttatttttatatttaatatcacttgctaaatatagcattgatattaaggctttttcttcatagcatatagaatctattttcatttacaccagctccttatatgcttcttttggcttagtaaaataacaaggcttttcttcttgctggacttcttttaactcccaatcatcttttagtgccttgaataaatagccatctgctttgttatgtttattacaaaaatttatgacaaacttaatgcgctcaataggtttattgagttttataatgtcatatggcttgatttttcttactcctaagagcatttttatctcttgttgtaatgctccattagaattaacaacaacttttttttcttcactctctattatattttctaaattatttatattagttgttatatctttctctttctctttctctacgctacattcttgtttcacttctattacatcttgtttctttgtgattacattgttgttacattgtaacgctttctttttctctctatgttctctaaccctgatagcactagctgtttcacttcctgttactgctaaaacttctggtaaaaaatattcttcatttgaaattgtttctataagattatttttttctaaatacattaatgttacttttacattttctacatcttcatctaattcaagagccatttcagaagcaaaatcatcttctacattttcaaaaactaatttaccatcatttttcattgccaataattgtaattttaaatagatgatagtatatgtatctccacctgctatctttcttagtttttttataactctttgttcaaaaaaatcttctttaagttttaaccaataataccttttagacatttacattacctcctgtatatttggagagcctgtcttaactctctctttattaattcaattagtgaagactacccagagctttgacaggctatgaatagcctccactaattcaagtaataaataggcttttttaaatgagaagcctataactcattaatctaaaaattaaaagtcatttgtgggtctttataattaaccatatgttctagtgctaaactatacatatctttttttatctcaaaaccatatgaatttctttttaattcttttgctgctcttaatgttgttccactaccagcacaagggtcaattactacatctccagcatctgtaaatatttctatcaatctttttaatattgctattggcttttgcgttggatgtattttcttaactttttccttgttatctttctcccagttaaaccaattttttatcatcttgccattattattaaattttggtaacttatctctataaaaaatcagcgcatattcagtagctcctacaattttcatattagctttcaaaacctgtgggctactttgttttataaaaaatattgggatatagttttcaaaaccatattttttagcatattcaattaaagtatttatttgttgaaatgcacaaaaaataatcatacaaggagccttccctttttctttcggctctttttttaacatcttttgacaaaaatgcataaattcagcaatcttaaaattatgatccgtgtcaaaaaatgctttatttgctttgctgctttctccatttttattatctccatttatataccattcaggactacttgcataagcattattccctaagttataaggtatatctgcaatgattagctgtgcttttggtatgttgtataccttaaaattttgcatatgatcgttatacaactcacatttaatctctttctttacttgttccattatttatcctcctattttggagtatcttccaaacactccgtataatttttattacctcaatcagtagttacaatcttttagtgtctggaagactataagactgcaaccactaattcaagtaacaaatttactagatacttactagaaagctactagatacttatcaaatactttttaatttctccagaaaaaatcttaataatttcattgatatatatagaaaaaattaatatttatccagaaaagcctaaataaaatcttgaaaaattagtataatggagagtgtgggattcgaacccacgaaacacctcgaggacttgcttaaaccagacttgcataactctccaaatagttttacatcaaacatctttaccagcttgtttacaccctagaatgcttgtaagattagttcttacacagatagccataaggaaagaaattttatttttactttctggggggagtaaaaacttatggctatgtgtctaaggactagccttagatttgattttccacttctaaaaagttataatatatttaccatttgctaagtgaaaggaaaagaaatggaaaaccaaaaactattaaataaagctattaaaaattttgttggaaaatataaaaaatatccttttttcaaaactactgaaattgcttgtggaataaaaactgaaatttatttacaacaagactgcatattatcagtaggttactctaatacaaacaataaaattgataatgaaacttttgttttgtcagcattagaggcttttaaaaattttgatttagattttttaaattaatttatattgcataaaatcttggcaaatggtctgctctaacttttataaattctttcactatttcagtaacttgttcatctgtaaaattttcttctcttaaaccttttatcaattcttttacttctgataaaatttctttcatttattctcctttctcataaattaaaaaatttagacattaaagattaaagaatagccctttaatcttttttgcttttacttttattattatcgtaaaatacgtttaaaaagaataaaaaaaattatatctttattcctaaatctattcctaaaaaatttgttattttaataatgctcttatacctaatattgccttttaataacaaacgcatagtatcataaaaatttgttggagacattccaattgataaagctattttctttttagatatgttttttcttaatctagctttttcaattttgaagtaaatttcttctcctgttattgttttagtcattttatcaccacctttttaatttctaaatacattttaacgtataatccgtaaaatgtcaagtaatttaattcaaaataaaaaaccactatttaaagtggcttttattctataataaactttcatccatctttttaaaaagagtttctaaaataaatgaataaaatataaaatcatccattgtttttattcgttctaattcttcattacttaatacaaaatctaagttattatcattttttgtaaatcttattctaacatttttagaatgagcaatatcaaatatcatttcttgtttatcattatctataacatattttacattttgataactttttcctttttcaaaatctgagtcttgtgaaaatacatcgccttttatttcataacgatttttatccgttagtacaattattctatcaaaactaaaatatctattacttacacaagaaaaagttatatttcctctgatataatattcatctacaaaatcatcatcattaaatctatactcatataactctatttttattttatctgactttttttctccaataggagtaattttattctctttattaaaatcgtcagctacaatatttattttttcgtcattatcatctattaattttttaaaactatctttatcaaggttatattcttttaaagtttgtaaccatatttctttcattttatctttattatcttcacttggatttataaattctgaaaattttattctcttcttattttctttactgctttctttttttaaactttctttttttatatctccattttgttcaaaacaaccaaaaattaaaaaacaactaaaaattaataataaaaatttcttcatattacccctccattattcccagttaattcatctattttatttaaaactgttgtataactattattgtctataaaatataagtaatcttctaatttcataccaatgtttaatttattcagtgaatttgctaatacttttttaatttcttttgttggcttatattgatgtactacaatagttgaaagtcttagagcttcataataattttgatttttttcttctgcttttgccattgttttaaagtatatgtcttcatctataaaatgtccaataggataaactgccaattcattaaataaaattttcatttcttccatatcttcttttaaagttctacaatcatttacttctagcattatattaatagcttcttcttttctaattaatttttttaacttatttcttataatttgattttctttttctatttcttctatttcctttctttctctgtcctcttgcttttttaagtccacaaaataaacataaagtaaaaatggaatagtaagaattaagcttataaaacctatggaaaataaacccaaaaatatagaaactatactaacatagaaaagagttttatctatttgctttggtattctttcagtaaaattaaaattatcaatagttatttgtttagtattattttttaacatattatatcatacccctcaatctttttatttcttccaacatcaaaaaattagtttctgtttctttaaactcatattcctcaaatacttcatcatctgggattaataaataacttgcaaataagtttgcttcatcttctaatctgcttcttcttagtaaacttgtgttatctattaaaaattgatgttcacttgatgaatgtaaaatagcgtgtcctagttcgtggcaacaaaccaacattttgtcaaactcattcaattttgaatttataaatataaattttcttcttaaaactcttttaaataaacccctaacctctcctaaatcttcaattaatacttcaatatttagttttttggctagtttaaatggatttttagttccatattttacaatcaaatttaaaacttttaattttatatccatttaatcgcctgcctatttctttattttatttttttcttttgcaataaaaaatgccgattggatagccattaaaactctttctttatcttcttctgatatagtttcatcattaaacattaatgctgactgttctataatatcattaaattgtcttttgcctctactgtctaattgcctatatagtggattttgaagtattttaattcctatatcttttggcactaacactgaaaaaagttcttttctttcttcctcatctaactttaaagcttttgctatcttttcaagtgtttctaatctactttttttaatttttcctctttcaatatctccgatagttccttgacctactcctgaaagttttactagctcttgttgagttattccttttttttctcttaatttttttaaagttatagataaatctgccatagtacaccaccttttttctttatttttcaatattataaaataaaaaacgtaaaaaataaaatttttcttgactttttacgtataaaacgttataataaattataaaataaataagattaaaagaaaaacaattttttttaaataattttaacgtaaaatacgttaaagaaacggagaaaatatgaaaacattagaacaaataaaaacaagaatatcagaattagaaaaagaaatatctttcttagtatcagatgctaaggaagatgaagatagaaattatataacaaataaaaaagctgaattatttagtcttaaatgggttttaggagaataggaggggtaaaaatgttagaagcaaaaaatagaagacagttaaaaaaacttttagaggataaaactctaagagtaattgaaagaaatatatcagacaatggtacttactttaaggaagtatcagatggttttagagagttcttaatctctcaaatcaaatgtttagatgttacttactatgaaaatggtaaacaacattttaaacacgggtatacatattattacattgaggaaaaagcaaatatacctgtaaaggtagaaactgcaatacctgaaaatgtaacttggaattaaataaatagggggagtttaaaagctcctccaaatgaaagggagagatcaaatgaaaaacttcacactagaattcgcagatcacaaatgggtaatgtacacagaaacagataacttatatggaagccaaatagataactatttcaaacttccagacctagcgtatttagaagacgaatatacttctataaatgcttactgggataacacagaagaacgaggttatatagatgtagaaataactgctgttcattctgatagcacttatccttttaaaactaaatattatgatttttctaagttcttgaaagatttaaaagacttagaaaatgaaatagaaattgacaagcttaatgtcaatgactgggaatatgaaaaagaagacccatacgggagcagaggattatcaatgagagattttatataggaggagaaaatggaagaattgttttttaaagataaagtgagtgcaaaaatattttacttaacacaattaagtggagaaatacaaatgaaattcttaggaattactatggcacattatactaataaaaaactagctgaaaaatggagagatgaacaactaaaagtcttaaaaaattgtgaacacggttttaaagacttggctattgaaaaattagaaaaactttataaaggaatgaaataggaggagaaatggcatacatagatagcaagaaattaaaagaagaaataaaaaatgcttttgttgatgaaaatcaagaaggtattgaaggaattactgcaataggtataaatggtggattagatatggtattacaaataatagaaagaatggaaaaataggagggaaaaatgcactgtaagacacttcaaaaatactggaatagaatatctttcccagctgggataacgcttgttgaagctgtggaaataatagaaaaatatatagaaatggagggagaaaatggaaaataataaaaatttattaatagaaacacttaatctattagaaaagaatagtagaacttggctagatgtaacagatgtttttattataggaaaatacaacataggagtagataattttcataagctagcctcgtctgctaattataaagaaggcagtgatgaaataaattcggaattagtaataaaagggaatgactttattattaatgtacattatgctgaggggtttagaacttatttagactttatagatttaaaagttccagaactatcagcaaaagaacctaaactatttaatttttttaatcacgaatatgttggagattaggaggagtaaatggaattaaaaaaagcaagttttaaagaaatagtaaaacataagattaaatggatagttaaaattttgaattatccatttaagaagttagaagaattgatgtaggagggaaaagatgattttaaattttagaacattaaaagcgagtgaaatagatgtaaagccacaaacagtaaaggaaaatggattttctttattgttatataaaaatgctagagttgatatggatgtcctagatgaaacagtaggaccacttaactggcaaagaaaacatagtagagagaatgctaattgtattgtatctatttatgatgaagataagaaaatatgggtagagaaagaagacactggaacagaaagttttacagaaaaagaaaaaggacttgcctcagacagtttcaaaagagcttgttttaattggggaataggtagagaactttatacatcaccatttatatggataagtgatagtaagtatatcaaaaaaagtaaagaggggaaattagccttaacagataaattttcagttaaagaaataactgttgtagataaagttataactggacttgaaataatagatagtaaaggaacagttgtattttctactaaatctaaaaaaacaactaagaaagaacaagacaaggcacaagaatatttgaacagtagagctggaatgatagaaaaattaactgaatatgttacaggagaaagacttgaaaaaactctaaaacattttggagtagaagcattttggcaaatgacagatgaacaattaaaagaggcttgtcaaaaaatatttaaaaaataaggagagaataaatgaaattttatgatgtagcaaaagactatattgaaagaatggaatatttagaacaaggtattaactcagaaacaggagaaatgacagataattcaaatcagttagcaatatggactgaggagctaacacaagatttaaaagataaatcaacaaatgtaatagcagttgttagaaatcaagagcttactattgaggctcttgataatgaaataaaaagattgcaagctatgaaagatagcattaaaaagaaattagacaagtttaagacttatatcaaaagttcaatgatagtaaataatattgaaaagatagaaactccactaggaactattaaatttactaagtctactactactgaaatttatgatgaaagtttgatagacaagaaatttatagaagttgtaacaactgaaaaaatatcaaaagaaaaaataaaagctgctctaaaagctggggaagaagttcaaggagcaaaacttgttgaaaataaaaatttaaagataggataggagtaattaaatggagaaattaggatacacaagacagacacaaaaattaatatattggcttttagatgactttgctaacttttggcaaggaaatgaagcaggagcgagaccatcatttatagaacttgcatatacaaagcaacttatgaaaagagaatttactaaaatctatgatggttttgacactgttaaaaatgctcaggcgttcctaatttcttcaataataaacaaggacaacctaacagtagatgagttgacagaaaatgttataaaggcattacagagcctagcaattcaaaatggagggtttagtctatcgttaaattcattaacacaaaaacaagctaatgattttgttaaatggctatttgaaatggctatctattgggagataccacttagacaagaaataagagatttgtttgctgaggattatcaagacacatttatatgggtaacacttaaaaagaagatttgttgtatttgcggaagacctggagagttacaacattttgatagagttggaagctcaggctataaatcagatactgggcttaattatagagtaatgtgcttatgtagagagcaccacgacgaagctgataactgtatcagtagaatagattttatgaaaaaatatcacttgacagggatatacctaagtccagaacaagtgaaagaattgaagaaagtatataaaggacactttcaagcatttaaggaggagtaaatgttaaatataaaagttaataaatatggagttttttttgaattaaatggagaaataataaagctagacgataaagttgttgatgatttagctaaaaaaatcgttagttatatttgctatagggataagaaagaaattatgatttttagcgataaggagaaaataggtttataaacgaaggaataacgactatttctattttggaaatagtcagaaaatacagaggttaatatgagtaaagatatggagatattttataaaaaagctttaaagaaaatattaaactttaaggctagtgaattgagtacagttgaatttgaacagataaaaagaaatgcagagaagttagaagtttatagatttgtgaggaggaagtaatggaattctttaaaaaattaaaaaatggaaattttgaaattaatagagaaactttagaagaattattaaaatcacattatatgtttcaagcgttgcaaggagcaaaagttgataagtgggaatggtactatgatgctagaagaaattatttggaagaagcctctcttggtgtagaagaaccttttgaaagtattgatgaattagtaaattttgaaataaattcaatagaataatggaggaacaatggaaaaagaaaaggttttagagatagaaataactaaaattaatgatgattggagtgctataacagttaaaaaaatcaaaaaagattttgaagataatgatttgttcgaatggattaatattggaggaaattatttatatgatagaaaaatttttataaatcgtatttatcctcacattccttttttaataagaaatgacattattggacttattgaggatgtcgtaaatacagttaatcaaaaatatggaatacttaagagatggaaaccaaaacttgaagaaagcttttttattgttgaaagggttaggaccgaagtttctttcaaatgggtagtaacagatttagtttataaaaatgaccattggattgatttttatgcaataaatagtggaaattgttttaagacttatgaagaagctgaaaaggtagttttaaaattagaagaattagaaaaaaacttctgggctaaggtaagagcaggagagattggagaatgagaacagaaactgaaataaataaaatagctgattgggaggaagaagatgagagagattaaatttagagcttggcataaagaaaaaaagataatgggagaagtgctaggtattgatattctccataaagaaatatttttttcaaatgaagatgttgattgttatgaacatacagattttaaagatattgaacttatgcaatacacaggattaaaagatatgagggaaaaagaaatttatgaaggtgatattctttttgagagttttggagaagaatatttcaaagttgtctttaaagatggaagttttagattagaaactggaggatgttctttacctttgaaagaatattcgcatatttgtgaagttgtagggaatatttatgaaaattctgaattgttaggggaataaaaatgaaaaaaattcttgatgtatgctgtggtagtaagatgttttggtttcagaaagagagagatgacacagtgtatatggataatagagaacttgaagatgtgctatgtgatggaagaaagttagaaataaagccagacatagttgcagattttagaaatataccttttccagataacagttttaagttagtagtttttgaccctccacatttatacagagttggagaaaaaagctggttggctaaaaagtatggccatctgggtaataactggaaagaggatttgaaaaaaggtttcaaggaatgttttagagttcttgaaattaatggaatattagtttttaagtggaatgaggaacaaataaaacttaatgaaatattaaaactagctgatattaagcctctttttgggaataagagagctaagacacattggttagtatttatgaaagaggagtagctatgattaagaaatatattaagaagcctgtggaagtagaagcaatacaattaaaagaggataacattatagaagtttttaattttttagatgacacaaattatgaaaaaattaagagtaaattagaattggatgaaatggtatatggaataaaagaacaaggttatataggaatttcaacacttgaaggatatatgaaagctagttttggagattacataataaaaggcattaaaggtgaattttatccttgtaaacctgatatatttcaagcaacttatgaggaagtgagataatggaatttaaaagaccagaaaattttgaagatatattaaaattacaaaaacatttagatgaaaatttgaataatgttagagaaagaacgcttaaagatattaaattatctttaatagcagaagtaatagagttcaatgaagaaacacctgaaagccataagacttggaaaactaagccttacgacaaagaaaaagaattagaagaatttactgatatttggttttttctagcacaaatggttaattttaaattagaaatatctgataattttgttgaaataaaaaatgaaattacaaaattatttgatgatagaacaaatttaaaattaatttatcagcctaatatagaaaatttaattatgagtgtgctttatggaaatgactttcaaatactccaaaatttaataattatttcatataataaaggctacacaaaagatgatattcttaattgctactgggaaaagtggcaaaagaatatgaaaagaattgggaaggagtggaattgatggaagaattaacatacaatgcaaaagaagtaatggcaatgcttaaatgctctcaagcaacagcatataggactataaatgaaattaataaaagatattgtaaaaagaataaactagatgaaaaggctcttgtaagtgggaaaattagcaaaaaacttttccacgaatattatcctagcaattaaaaatttacaaaaattaaaagggggagtaatattatatatgctctctctttttttaaaggaggaaaaatgaaaaatgaaaatggaacagggagtgtatataagttaaaaggaaaaaggaggaagtgttgggtagcaagagttactgtgggttttgtagatgggaaacaaaaaagaaaaattataggaacatatgaaactaggaaagaagcacaagcagaattgttaggctatttgaataatcctgtcttatatagtggaaagacttttaaagatgtaaaagacttatggtattctaattactctaaaactgtatctgatgttactttaagaaatgttggtaatcagttaaaaaaattagaagtctttaatgatgagaaaataaaagacttaaaattatatacattgcaaaagttttttgatgatttagacagtgcttatggctcaaaattagcacttagaagtgccttgaatatgatatttgaatttgctttaaaaaatgagtttatagaaactaatcggattaaatttattgaattaggaaaaaatgaaaaagtagttgaaagaaaaatttttacaactgatgaaataaacatactctttgataacttagattctgataacagatttataaaaaaaatgtcttatgcaactttaatattgatttatactggtcttagaataggagaactgatgaatttaaaaactgaagatgtagacctaaaaaataatatattatctatcgtagaaagcaagactattgcaggaattagaaaagttccaatttctgaaaaaattataaatctttttaaagacaatatagactattcaaaagaatattttttgtacaataaaaaaggtggtcaatataattatgttaatttctttcaacaatttcaaacaatgttggagcttcttaatttagaaagacacacaatccacgacacaaggcatacgtttgctacacttttaaataatgctaatgcaaatagtacatctataattaagttaataggtcatagtgatttttcaatgacagaaaatgtttacactcataaagatattgaagaacttagaaaagctgttaatttattaaattaaaagtgttggctatttgttggctacctaattaagaaatatgataaaaataagaattataagaaataagaaaaacttaaaaagtattgcaaagttaaagttttagtatttactgtaattaaataaatcatagaaaaaaagatttttatttacaatagaaatattaatttttcaattttttctataatttaaaatagtttttatcatagaattttatagtttgttggctactcgttggctatgtcaaaaaagagggagtttttcatctaaaaaatggtataataaaaataaaaaagaggaggatttataatgaaaaaatttgttgaacaatatgatattcgtatgtcaccagatagaattagaatagcaacacaatttagaaaggagtatttaagagaattttacaagtataaagtaacagctattgagaaatatttaatagcaagacttgaagaggaaaaatgcaataataactttgataaagcttctaaaatagataaaattttaagttctataattggtattgctgattcaactgactttataaaaatagaagaatcaatagcatatgataatgaaagagaatttcaaagagtggtttttgaaataaatacaacaaatatagaacttgcaagatttggaatagacttagaaaatgatacatttacattataaaagcaatggaaaatcaaataaatgaataaaagcccagctaataactggactttttttattttagaaacaggataaaatcctaccctattaatcttttttacatctcaacatatgattatttatttcttttaaacttgctttaatttcttgtaaatctgatttaaaagcattttctattttttctatcttttcttctatgattttatctttttcattactccaattttcaaatgcttttctatgttcatcatatacaattttatctagctttttatcaatcatttcttctagtctagcattattcttttcaaattttttatctaaacttgaaattatgccccaaataaacccaacaatgcctaatatactcccagcaaatgctaaatgttcttgtgttaaagatatcataaataatattattcccctttcctaaaatgactagccccaaatattctaaccattctatacattaaatttctttttattttatttactccacattctttcataatttctaagaatatcttatcagcttctgctcttgtaacattaattttacattgatttgaatatagccaatcatgaataactgccgctcttccatgtttaccatatgaatttataatatttctgaaaattctaggtactgaagcataatcagttttaaaaccttttggaacaactataactcctcttgatgtttgataaaaataatcctccataacttcccaatatttatcatctattggcattgttttaagtttagatatttccattttatccctccttatcttctaaattgaatattatctgctgttcctaattgaaaatgtacagagtctttttgcttccaatttccaccccatactatattatatttatcaataagtcctttgctttttgcaacatcataaatagctttataatatttataatcccatctagcaactgtcttttctttttcttctccagttttcttatctgtatatttttctttttctaagactgctatatcaacagcatatccatatccatctatttttacttggtgttttgattttaatttatatccatcacaccaactgacttttggttgtttgttgccattgctatcatataaaatagttcttcctttttgatattcatgattttgttcttcagcagttctaactccacaagttattttaaaatcgtatggagattcctttataagttcttttataaaatttacaacatttggatgaactccattcattttttctaaactcacatttgataaactaaacatataacctccttaaatataaaaaaaattattttttatatccaaaattaaattttgttgcttctctaaatataaaatctttaaaatttatatttaataaaaactattttaaaaaaatgaccttgtaatatcaatgttaaagagttttattaaaggtagttatataaaactaccttaactttaaaaactcttaattctagactttagctagtgcattgtgtatttcttttctttttttctcaaattcatcttttgtaagctcttttggattaatttttgttttaaaataatgttctgtatcataaacagattgagtaaatgttttcccaaagctagctagcactaaagattgctctaaatttaattccaatccaaaattatcttcaaaataccaagttattggtttttctttaccataaacagttttttctgccaacataaaagttatatttgaagctaataatgttacatctttatctctacatctttgtctatgttctgttttatctactttataatcaaatccataatctaatacttcagcttttaagctatctattgtattaaaataatcttttctttgtgcttctgtgtctaggatccacaagtgtttttcactatcccaatttaagtacttgtcatctccttgtggctttggcacttttattatttttttattttctatgaactcgccaacttcaagagttatttcaatttcatttgcaactttttcatctcttgtcatttctctaattgtgttattatcaaaaataggatagttgaatggtgtatctctttcaattatcgttgaattgtctttttgaatgttaggataatatgaaaaaattgcgtcccaaccaccatataacttgacttcttctgatgttaagtttacatcaaataatagttttggtaatttttcttttgaatatatataatacattttttctcctttcaaattttgatattttaggttatctgttccatcacagacggatatttaaaataatgaatatttgcatattagaaataaaatttgcaagagtagcaaataaagatgtaattatgcctgcaacagctttacctgctgaatttagacctaaaaatgttgaatacctgtctgcaattgcttcaacaggtggtattaagatggactatcattggcttagattagagacaaatggatatttttacactcataataatgctggaataactgttagaaatttacaaacaacaatagcttatatagctgctaattaatatatatttttagcaggataacttattgtaaaatagtaagcaccagcattgtcatcagcttctgattttattaaattcccattagcatataagaaaaatgtgttagacttagtactatttctgtaagaagcactaaaatatagagttttatctggtctatatttttcaggtaatgtaaaaattgggacaccgtttttattaaaaaaagctgttccactgtcaacaataagagttaccatacctgcaattttatacactcttatatctgttgcattagttatagataa

SEQ ID NO: 8 - DNA, 18 bp, Artificial sequence
  cos packaging  nucleic acid sequence
ataccgcttcccctcttt

SEQ ID NO: 9 - DNA, 24 bp, Artificial sequence
  Single strand DNA oligonucleotide
ctatttgttggctacctaattaag

SEQ ID NO: 10 - DNA, 24 bp, Artificial sequence
  Single strand DNA oligonucleotide
aaatactatcctgactggtgtaag

SEQ ID NO: 11 - DNA, 24 bp, Artificial sequence
  Single strand DNA oligonucleotide
tagccatctggatctgttagaatt

SEQ ID NO: 12 - DNA, 20 bp, Artificial sequence
  Single strand DNA oligonucleotide
cctcgtgtatggtatgaagt

SEQ ID NO: 13 - DNA, 23 bp, Artificial Sequence
  Single strand DNA oligonucleotide
atcaaccattactttaactctac

SEQ ID NO: 14 - DNA, 22 bp, Artificial sequence
  Single strand DNA oligonucleotide
atcaagaaggacaagttgctga

SEQ ID NO: 15 - DNA, 4063 bp, Artificial Sequence
  bacteriophage genomic nucleic acid sequence
cacccaagcagacgccgcaatatagcagcaacaggaaagtgagctactttctgcctttgcgagaagtcacggtacggtttacttcgttcggttaaagaccaattctttaacagataataagtacctaccgtgacttctcgcaaaggcagaaagtagtctttctgttggtgctgatattgcggcgtctgcttgggtgtttaaccacgcacagatcctaagaccgcctgttttaaatgtacagctcattcaactattagcgcttatagttttggttaatgaacgtaacgaaactaaagtaaatactaataattaatattacatctttaatatcattcatctctataacctcctaaggataatccaataagatcataagttcctaacgcctcttggatagtcttattgaaaggtatttcagttactttttttccttcttgctcctgtactagatctatataacatttagttattgcaaaataataaattaaatcattattcattaaagctttacaagccttatttaataaatcaaaattcaaagatatttcatcaaaaattttttcattattaaatttgttcattaaatctgaatatgcggaagcatcattagttatgtcattatataattttggatctttacttcctacgagtttaggtctgaaagcaacagcgtttgcagttatttgcattttatcattttcttgatagataagaaaagataaagtaatggggcttatacattcataaaataatactccactactataaccttgtactgtttgctcttcagtctcaccagagattctgaaaagttgtgctctagtaacgttcggtaatgctggactgaaagatgccgatcctgccggtatcggttttcctcgtaatccctcgtatgcctttctatctagttgaagtaaatcaattaatttgttaatagcaagatgtgaagcttctttgacattattatgttgtctagataaataagcgattagtttagaatgcttatttactactccttcatcagtatttcttgtgtcttctataacatctattctattatcatttttaattaaatcaatgtatcttttagtaaaatttaataaaccttgattttcactagttaatttgttaatataaggtgttaaatcaatattattaggatcagcattgattatctctgttaaattatatttaactaaatcttcatataacatcataaaagtattcaaaggaatactatatttaattagtttaataacaattgccatatcataatacaatttaacattagaatggaaaccattcattttaaataaaaatttaaaatcatttagtttaattgttgtatggccaacattaatcataatattagcatcatttaaagtattatcagtaactatatcatatactaataccttattatttgtatttaagatagtagtccaattaggtgaccaaggtaaatcgactaaacctaaagttaataattgtattttattagtatttggaactgaacaaggaataactatatcaatcatatcatataacctcctaatggtgaatattgatgaaagaattgattcttcttttcattaatctcatcaataaattgattaatgaatggttttgttactgttatagtagtattcattccagatataattttattaatgcctttatgagtaaaagctaacacatggggagaatcatccccaagcgcgaacgtattagtctcttcattctcataagacaatgatgctctcacagctgaattatgatttataagtgatatgaataacttaagaaaaatgacatttgatattttatttagaatgtcattagtaattttttgttcagctaaatcattagcaaataatttcatttaatcacctcttcttgttagtaagatgaaacctaagccaacccctaaaagtaaaagtaactttttgttttttaacaaacccattaagatacttccaccagctatactaccagctataccaggattatcacctataaattttgttcctttatctataatagtagtgagtgaaccaattaattttgatattataccagatgcaggagcaacagcagcagcacctactaaaccactagtagcaccatgtccagccttcgcagcagctagtcctaaggctcccgttgatgtagcagcaaatgtggttttgctagcagcagtaagtgcgaaatactgccacgcaaaatacgctaacacacatataagaactattactaatataagcttccagtgctttttaataaagctcttaactgctttaaatgctttgctgattccactaccaatttttttccaaaagctcattttattcctttattagtttttggaaattaacagttttaaattttttaatagctactaatattccataaacagcttctatagaataaccaactggatctttcatgaaaccaagaattgctgctgctgctccagccacagttggtattaaattttcaatgttaaagttatcattcttttcatcacctaaaaaattaaatacaccatcagcagtagctaaagtagcaacagctattggtacatctaattgttttccaactaacttaacaatattatctgaattaccatctttcttttctaaaaaagctctaaatgtcattccagctaatactactagacctggtaaaaaaaacttcttaaactcaatttttgtatctgccataattcctcctaaataaaattttgtactagttataatcaacctaagtttaatttaaggttgataaagttaaatttcgtatttaaatagatagtttatataattaaaagatagaaagtcagtgttggtaactcatatcaacattaccaagcctgtgcatcactgtttgactcatcgtctccagaatttagtcgaaccttagtataatggtctttagaattattaactaaacgtactgattcaggacttttgctgctagcaactgtttgttcaataaaaccaaatatacctttaacttgagctctttgactaggatgtaccatctgtgttaagtaagatttgacctcattagctgatttgaactcaggtatatctgattctggaatgttcaataaaacagcagtaatgcatcttaacttcgcaacatcacttgtatccgccctaccgattgccataactttttcaaatttttctctatctgcatcatccatgtctatacccatgagacctgctaaattaaaaatattatttaaatccatttaaacctccattaagcatttttataacaatttaatgctactatatcatctacagttaaccatgttcttggtaataagtaagatgtagtaacaacagatattacatcatccatccagccttgttcatcatatgtcacccattctaacggttctctaactggtgtactagctaaatcaattaataaatctgtttcatcaaaaagacgcatttttctaaatgcatcatcaattatacctttaattaaattaaagtcttttggttctaaagctttattaactcctactacagtataaatattatcaataaatggaactgaaatagctctaattttaataagaggtgtattttcaccatatttatcctgtaattcccttccaagctggccataaactagaggtaccccaacttttcttaacatatttctagttaattctttttcagaataaccagaatttttaaatttaaaagctttaaaataacctctgcctaaattataagcagcttgagcagctaagacagaagctactgccactccaaattttttagctaaatctttaacattttcagacattttatcaaatagagaactatcaacttttttagcttgagcaattaagttttggtcaggaactacttgttcaagaaatggtttgatagacatatctccactttcagtaaaaacacctttaattagtttaggatctaactgattcttatctaattgtgccatatttcctcctttgcacaggtaactaaaatttgccaaattgccgtagatttaaagtgtcacaggttaaacaccc

SEQ ID NO: 16 - DNA, 8088 bp, Artificial Sequence
  bacteriophage genomic nucleic acid sequence
tggcggattgggtgtttaacctcggccgaaaggttacttagtaagtgggcttgtaatggtagctgaattttaactagtaggagctaaaattaataagaatataagcgatagtgaaaccttattaatcatgcaaacattactatacgaaagtataaaaaaggagggttgcagtataagttattattattagctggggccatgttaataaaaattaacttattggcttaattggtttttaagatttataaaatttcgtaataatagtatgaattttattaaattttactaattgatatgttaactccaaacctggcgagtaaggagttataagtaaaacttatttaacattcaccaaaaaaatgttaaataacagtgatggaggaattataatgaaaactattttaaaatgtaatgtctttgaaaaaaaacttttaaatttttgtgattttgtaagtaaagaattagttaatgatcctgattcttttataaaattattatatagtaatggtacacaattaaaaaataatgttattaggaacatcagaaatactggtattaacaatgacctaagcgatgtattggtattagttaatcctcaacgtgaagttgctattaaatcttttattgatcctttattattaaaaaatttactggaagatgaaaatgttgaaattaataatgataatttttttaattttatgttattagcccattctcttaataaatggattgataataaaaatgatattagagatagttctttaattaaagatgtatttgaaaatgtgacatcaagaaaatatatttattctgatgactttgaagcttataatattactgaagatagatttaatattgattatatttcaaagtacttatactctactttagttaagtcactaaaattagacacaatttgtacagatttatttagatgtggtacagatattagttctaaacttgtgagcgaaaataaaattggtatagtacatgctacatcagttacttcaataattatgagttttgtatctctattaaataatgtttatgaaaataataatattttaatttcttatggaatagatacatttaattttcttaataaattatcttataatgtttgtattattccagatagagataaatactttgaatatttaataactgttggtaaattaaaacaatctgataaagaattaatttctaaaactgtagataaatggattaaaattttaagtatttctaatatattacaatttgctaataaaaaaacattagattctgaatataaatatggtatgaattcacatatccctgtgtttgaattagataagttagaatcattaaacatcaaaattgctgtgattaataattatcttaatatttattatgataatttattagctgatcctattgatgaaattagaaattctactaacggtaatagtgtttttcttctaattaattcagacaatagtttcttaagcttatattctactaataatagtagaataagtaattactttaattcttacactgaatttacagatgataagagagtcggtactattattaactcatattctttgatgggtattagtcacttacaatttgatggttttagacttcctattaaaaatgcattatttagaaatcctaaattaaagaaagtgattaattccgcatttaataatatattctctgattatgataatttattagttaaatcattaatagatgaactaggtttagatagtactattaattacatctcggtcttattagatgatttaattgctagtggtaaataccaattatgtcatctaaatgaattttctataatattattaagagaattagacaataaagataagtttattgatgtcagtacatataaatggaatttttcaaataaattacaaacacttgctggtgttaagtataatgttatatggttacctttaattaaattaattaaggataaaaatagtgataataaattcactatagaaattgatcaaagtaatgtaaatcaattactttctaaaattatggtaccattagaagttaataaattcataaataatgatattttatcatttataagtaataaggaaactaaattattgaatgaatatattaatatttataatatgaataataaagaagaattaattaatcaacctgaagtattaataaatgatgttaattcagctataattagtaagctagacaatagtctaacagattttattagtgataatattaaacatattattaattttttaattaggaattatagagatgaatttattaatttattacttaatgataaatctttagctacagttttaactactaaagctaatgagttattaattaataatccgaataaattaatttcatatgatgatatttttgctgaaaattataatcaagatgaacttaataatcttagaacatcaattaacaaatgtttttctaaattaatgtttggacatgctaaagctatgactggtttaatgcctatacctacttattttagagaacaatacatcaaagcagttttacaaagaattaaaggagaagaatctttaataaataaaaattataagattaaaagatattttacttataatagtaaaaatatcactgattttttaccattttcaggtaaagacaagtgtatgatgacagtagacatagatgtaaatagttctactataattaaccttaaacaaaaattaaaatctttattaaagatatttttgattaattgtttaaaagagttgaatactaataatattattagtcctactacttatttaaactctaataatctatttgaatatacttttaatgaattcttaaatgaatatagtaattcattacctagtgctggtactgataatgatattaatttaataaattatacattatattgtttaggtcctaaaatgttattagataaatctatatcaacattagatcttgattatattaaatccattaataatgatagtttgccaaataatatgaaagatgatgagtatataacaaaaatttctgatatacttaaatctaattataattcaaataagttcttatcattaagacctattactggacataagaattggattactttaattgctgattattcagtagtgacaaaagcaatattatctgcttttaacataagtaaagatttacttgaattagtatttgattctgagttcgataatatcatagagaatactgttgctgaatttatagtacttcttagataggtgataatatgttattagaagaattatttaatgaatttcaagctagtataaatgaattttttcctcagttagtatatgataaaaatgaaatcagaacaaattttatgaaaagatttagtaaatataatggtacaagcaagaagataattgaattcttaccaaatattaaagatgatgacatcagattacttaatgttattgaaaaatttaaatcaacattattaaataaatactctgatatgaatgttggttttgatggtataagctatattaagccttacagaagtaaagacataaacagattaaatgtacttatgtcagcaaaagtagcgcagactatagctaatcctattttaggttgtgtcattaagtatgatgataacttttatgatacagctgatagagtccttagtagtataaagaagttagttcctaaagttaatattaatgatacaataagaaaaagaaaaaattctagtagtggttctttttttggaataagtactcatgatttctatatgaggttatttaatatatttaaacataatgttctcagtcaaggttgggattatattaataaacaatgtgattcaaatagagaaatatttactcaacctttaactagaagaatggataaagcaccgaaagtatactatgatatgactactaaaggcgaaatagaagaaatcacaagagagttagactcatcttataataatttgaaaaagtatgagttggttacttcaagacataggtttgttaataatgtatctgaaatagagaggatgttccatttattttataatttagtttcagattctataaagaacaactatgcttgctctttaacttatgatagagattatattaataatatatgtgataaattttgtaatgtagttgattattatgatttaaatgcatatatacctgttggaactgatggttctgcatttgataaacatgtacctgaaccattaatgcataaattagaatctttctactctagttattattatgataaaccttttttatcaaattttagatgtagaaaaagattaatatttcctaatgataaaggtgaagctattaattataatgatattattactaatttgcaatcttatttattagcacataatattaatccaaaagttaataaaaatattacagaacttcttgataaatataaaacaatattaaatttagatagtggtaaatcatcagtttcatttgatggtaaattaagtagagtaatttcagaagttattatattagaaaaaatatttaataaaaaattatctgaagatgaaattgactcatttctaaataataaactattaattaaaccagatatgattaataagaatattattaaagattatgaagactttataaatgagttgaataaagaaaatgaaagcaatatgtcagatatagaaaaatttttattaaaatctagtattaaatttgaagattgtcaagaatttgtttttagatttaataattctagtgatgataatttagcttttatgaatagatggtttgctaatttatatttatatattatattactaaataataaaaaacaacaaagtttaaaaacatttgatgatatcactaatatagttgaattatcatttttaccagttgatttagatggtgaatatttatctatggtatttgtgagagaagaaaacactaacaatattagatttactcataattcaatgcgcaggttcgctagtatgcttaaacctgagcatggagttaaattaaaagacggctacaaagattttaaattaggattaacaagtagaattgaaacatttcaagaatgtgtagatggtcttgaaaactttgatattctcaataatttatttattgaagaatttgatgataatttagtaaacttagtagataaattgatagtgcaagtacaattaagtcaatctgaacttccagaacatttaaaagcatcattgactgaagctgaaaaattactattaactaattctgattatatatattataagatagatcctaatgatattagacctgaattattagattatcttttctttaatatagataaaaatgacttgttagaaatattaaacaaacttgacgttgattttgaattattaactgatcaagaaatactagaattagttgaaaggaggaaagaacttgataaccattaatttaattaataattcattaactgataataataagtttagtgaactatttgaattaattgaatctagtcatcatgtactaaataaaaaatataaatttttagttaaagatgatttaaaattaatattttctgctaatggtattagagtggtggttattcctaaaaattttatatttgatggtttatcattgaatatattaggaataaaacttaaaagagaattattttttccagcattaattcatgattattactattcaacaaaaatagtaagcaggaaagatgctgataaggttttatttagcatgatatgtaatgatcattctaaaatacttgctggtataatttatgctggagttaggttatttggtggtaggtattatggtagtaagtgataaaatattaaatttacttttaataaataaatttgaatttaatagattaatacatgaattagaagagaaaaatattttttttaatcaaatttattcactgtttcctataattgttaattttaatgatttagaaattattaaaaataaaattttaaataaggaggttgacttaaatgaattcgttaacattatctcaaaaattaatttacatattgagtcagaagatgctaataactgaagaccatattattaatatatcaaatatattagataatgatactttactagattatgtaaaatttaattttgatgatgaagtttataatcaaatttatactttaatgaattcttagtcttataatatgagattttatggtattaaattagaaaaattaatttttcctgtagatgaaactataatggaattgatgaaaaaagttggagaacttgagactcataataaatttctgaataattctaagggctcgtctgcgaaaggaaagtatcaaattcttaatagtacttttaaaagaattattaagtattataattcattaggttttatagaagatgaaaaagttttcttaactcataatgaagataatgatgattctataatgctacttattatggattattatgtcagaacaattaaaagtgtttttgatttagctgatattacacctggtacaatatatttatgtcactttattggagctgaaagatcattacaactattaaaacatagtaattatactattaaatctttattaagtaataatgaaattagttggaataaagatgtttttaagagattctctttagatatcaatacaacaacaggttaccaatttattgataaaattgattcattagtgtagtcataaatttaaatcttttaaggaggttaaatgaaatataatgaaatagtaaatctgtttaaacacagtgattataaaactgctataacaaaaaatatgcctaaagatgtattagagacagtattcaataggtctttagaacaagggataaacccatttttaccaatttttcaaatagctgtagaaacttctggtaaaccaaaattacatattaagaatgataactcatataattggtttaacattactgctacagaaaaacaaaggcatgtagtttatcctgttccagaatatgatagaaaaggaagaagaattattagaaatgttaaattcagagtgtttaattcattaaatgatgctgtagatgaatttattaagttaattaaaaattcatatcctaattataataaagtcaattataagtctttaataaacaaaaatggagctgcttatgcttcagcggattataatggccaatcttacactcaaatggtaattgatgttgccaaaaataattttaaagctttaggtgtaaatgattattctattgaaaatttacaaaaattgtttaaaaataattttgttaatcttaataataataaatcagatataccaagtaataagagaaataggtcaataaaagctgaacaattcagtaagagagaaacattatctaaagataatacttttaaaaatatttctttatcttctactaaaggaaaacaaaaaattagtaaagatgttaaaaaaggatatcataataaaacaataattacgaaaaaggataataataaaccttatgagcttgtaaatgatgataagcattttacaatatcagttaatggcaaatcaatagatatttttaattctgatgtacatgcaactgataaatggaataaatatattaaaaatgttgcagatgaatttataagaactggtaaacttaatattaattacaatggtatgaattttttaatagacagtgatattaaatttaacaaatttatagataagttaaccttagattacatcgaatttagaaaagcgagataacttagtagttttgttattattaaatgagctgaacattttaaacaggcggtcttaggatctgtgcgttgaggttaaacacccaagcagacgccgcaatatcagcaccaacagaaagactactttctgcctttgcgagaagtcggttttttgtacttcgttcagttataagatacgattgtttaaccgattcgccatctaccgtgacttctcgcaaaaggcgaaacaagtagtcactgcctgtcgctctatcttcggcgtctgcttgg

SEQ ID NO: 17 - DNA, 6007 bp, Artificial Sequence
  bacteriophage genomic nucleic acid sequence
caaaggcagaaagtgaagtcacttgcctgtcgctctatcttcggcgtctgcttgggtgtttaacctgagtggcttctgtcttagctgctcaagctgcttataatttaggcagaggttattttaaagcttttaaatttaaaaattctggttattctgaaaaagaattaactagaaatatgttaagaaaagttggggtacctctagtttatggccagcttggaagggaattacaggataaatatggtgaaaatacacctcttattaaaattagagctatttcagttccatttattgataatatttatactgtagtaggagttaataaagctttagaaccaaaagactttaatttaattaaaggtataattgatgatgcatttagaaaaatgcgtctttttgatgaaacagatttattaattgatttagctagtacaccagttagagaaccgttagaatgggtgacatatgatgaacaaggctggatggatgatgtaatatctgttgttactacatcttacttattaccaagaacatggttaactgtagatgatatagtagcattaaattgttataaaaatgcttaatggaggtttaaatggatttaaataatatttttaatttagcaggtctcatgggtatagacatggatgatgcagatagagaaaaatttgaaaaagttatggcaatcggtagggcggatacaagtgatgttgcgaagttaagatgcattactgctgttttattgaacattccagaatcagatatacctgagttcaaatcagctaatgaggtcaaatcttacttaacacagatggtacatcctagtcaaagagctcaagttaaaggtatatttggttttattgaacaaacagttgctagcagcaaaagtcctgaatcagtacgtttagttaataattctaaagaccattatactaaggttcgactaaattctggagacgatgagtcaaacagtgatgcacaggcttggtaatattaataactctctatttaatttattatttgttgctactaattcacttagtttatcttgatcagaaccagattcagctaataataatgcaatctgctcctttacagttgcataatcttttaacaccgtattgacatcagtataatatctacctgttaaagttatattatatttatgagtagtactatcttgatgaatacgtttaagcatagctatattatcttttaatgttttgacatcatctattattgccatgaattatcatacctccaattaatcctagagcagaaccactagctacgcctattaatttgttatctttacataattcttttaatcgatcattattcatttctaagtcttttatatttttattcttcttttctatttcagctaataaatttttaactctatcactatcttcatcctttttaaaattcattaatgttttaaccaaaggaattatcaacttatatttttctttcattaaacctccaaataatttttacttattatattatttaatatccatatcatataatggcctttaatagtaacattaatatcaggcatttctgataataaataaaaatctaattctacattgtttcctactttatttagcaatgatgtaacaaaatcaaatttgtattctttaacgcttccattgtttaatcgaaatttattaaatccatataaaacattaagatacatcaatgttgtatctattttagtaaaattatttttactatcatagctatcaacaaacttttcattaatagttattagatcacttactaaatctactaacttagaagattcaacatctaatatagtcaaatcccaagataaataattatctatcatattatctatagtcattatctcaattagtttgattaattctttaaatttaccattaaagtaattttcaatcgaattaatagcatcagcaaaataatcacaatatttataagctatagaattatatgtaacaagaaaatgacgaaaattagattcatccatatcaaaattaataaagtttagatttctagaatctctgataaaaggataataagatttattgctatgtgaatcaaattcactcattttaataaagtaattaataatattatctaaataattagttaaatctacttgttttccattatagatagaaccaccattaacaataactttatcaccaaaagttcttataatattattattataaatattatcaaattgaagtggtattgttgaattaaataactcatctctagaaattatattatttttatcattatgcgtcattaatttgtcaatcatatcgtacaaatctggtctataatataaatgtaatatatttttctttaaattatatgtatgtccattataattaaataaaaatttaggcacagcttcttgaagataactaaaatgatttactaaaccaaaaaacttatttattggtaaatatgatgaatctcctcctacaccttcaaatataaattctccatatttatgaactaaatttctaatatctataattaatttataattatcaggtatagttccaactctaacaaaattaaagttgtttttaatatcccatatataatcaggtacaattgattcactaccattagcttttataacttcaatcaacttgtttgagaagtaatcaaatgaaaactctttattaacaatgctattaataaatcgaattatagccctaacttctgttagataagctatatgtttactccttaaataaacttcacgattagtaccagtgttgtttttactaaaatcatatatatagacatcgtgtaaatcaccatttgatataataattatatttataatacctattaaaatgaagctaatattcttattagttaatttctctatattaattgtaatattattactatcatcagtagtaccataatgcatgagatatattaaatcattcttctttctgattatcatgtaaacaatcctccatattatatataataatataatattatatctttacaaaccttaaaaatttcagctttagtagccgaattagatatatataacctaatatcaacttcataagataaatcatcattaataagtattattttataatcttctaattcttcaactgttacatcaaaatctaagaaattagataataatataattaaatctttagtatttgttttttttggtattaaaaatttcataattcctccttaatgtgtactaaatcatcaatatgatttacgatagatttataatcaatatctttatatcttaatttattaggcttagcttgcttattaataaatctaaatgcagaagttctgactaatgattcatcagaagtatctaacagacttctatcctgtaataacatcttatttactattaatccccaagtattacctaaaatcatgttaataattccagcgtcaatttcattcctatcaactctatgagtagctattattactgcatttatctgttcacctaaaaactgtagtagagcatataatttatctaatccttgtctattaatacctgctctagatgaacccttgttagataaattacctaagatactagtaatactatttataacaataatcatgttagcgttgtctctatcattactagcgattaaagctttttgatcaagtataaatctaactagatctataagatcaggtaaaatttttgattcttcaaatttatctttaattccatcatttctaattaaaccatacttaaactgttcttttaataatacatctgctctttcaccgcaactaatatgtaatttataacaattagattcagtatgagatgataaaaaaatattattaatcaattgtttacctgaattagcagtaccaatgttagcgtaacaaccaaataataaatcattatcaatcaaaaaattacctgttaaatgacttaagttctcattattagacaaattttctactgcgctgtatatatcaacatctttaacgacacctgttttaaatgggttagctcttattcctaactcattaacagcaactcctaacctattaactcttttaacttttgatagtgcatttctacctttatttataattgaatcatataatattttaggtatattataattagtaatcattttgtaaagcatattaaaaagagtatcttcatctagaggcatattattaaatatttcatgtgttactcctcttttttgaagttgatatttagctaaagtaagctcatagccattttcaatatgatttaatgctaataagttaataactttatctcttaacttaattgggttattcaaactaaatgatataccaagttcattgtataaagcataagcattatcaatctcttcacccatttgatcctcaattataggtggtgaaattgcttttaaacctgcctctaaccaactatcattatctttatcaattttactagcgactatcaaagctgctagttcatcataaaatttattacttagcatagttacctcctagaacataatgacttaaatatatataataatctaaatcatctgtaattaaattaatgaaatatttattattattatattcattaacataaatattataatcattaattaagttttctatactaccattattactagcttcgtttaaataaactttcaaaattttagaatcatatttaggtaaaaatatctgataagataaattgatagtactcttgctaattatatctatcaattttaaatcaggtttaaacttaattgaattattgtaactattaagcaaaaggtgtttacttgttaaaataacatagtttaaacttgattcttcattataatttaattttaaaattacatcttcaatagaactatttgaattcaattctaaatcatcatctgtcaatattgacaaatcttttagtccgaatgaaatcatcatgttttttactgtattaaaatttgtttgttctaatccttgaataatattaattttcatatttccccctaaataaattatcaaaatttctgatatagacattatcacgatctataataagtatattattatctattaagaaaaagatacaatatttattattataaacagcattttttattattgtaaaagaatcattatgttttgttttaatttgtgtataagaattacagtcttgtataatactgtaattacaaatcatattactaaattcatttaagtctattatttgatttaattttttaataatatcaataactttaccattatgttctttgaattcatctaaaacatcaagattaacaattctattattgccattaatgtcatttttgatgtaaatattagttatattttcactatataataacgataaaatagttaatttagttaaattgccattatatttaatttgtttaactttactattattatattgaatgactatataacttcctattgttatattacgtataaatgtagataatttattaattatcatatttcctcctataaataattgaattaactaaataaaagtaattaaaatattaaacatttaaattaataatataaatttaatattattaatctctataataaccaatgataaatggtgttaagtcattaactttataattactatcagttaatttaatatttcctagtataaatttcattattttacctccttaatgtaaaaacattaatacgatttacaaagtaatttatcatttacttaattttaaaataaaactagattttaagtttccataatatacctccttagaattatttacttcttggaaagcatcatgatataaacatatcatttattgtactgttttattaaatttagacaaatttttttattcagtactatataatatattaaattatagacataatttaatttattataacatatctgtccaagcagactcagaggttaaacacccaagcagacgcc

SEQ ID NO: 18 - DNA, 8187 bp, Artificial Sequence
  bacteriophage genomic nucleic acid sequence
aaagtataaaaaaggagggttgtagtataagttattattattaactggagccatgttaataaaaactaacttattggcttaattggtttttaaaatttatgaaatttcgtaaaaatagtatgaatttattatcccgaaggactagatagtagtaatgatggaatgatcattaagatgattctaagatctcggccgaaaggttatttagtaagtgggcttgtaatggtagctgaattttaactagtaggagctaaaattaataagaatataagcgattgtgaaaccttattaatcatgcaaacattactatacgaaagtataaaaaaggagggttgtagtataagttattattattaactggagccatgttaataaaaactaacttattggcttaattggtttttaaaatttatgaaatttcgtaaaaatagtatgaattttattaaattttactaattgatatgttaactctaaacttggcaagtaaagagttataagtaaaacttatttagcattcactaaaaaaatgttaaataacagtgatggaggaattataatgaaaactattttaaaatgtaatgtgtttgaaaagaagcttttaaatttttgtgattttgtaagtaaagaattagttaatgatcctgattcttttataaaattgttatatagtaatggtactcaattaaaaaacaatgttattaggaacatcagaaatactggtattaacaatgacttaagcgatgtgttagtattagttaatcctcaacgtgaagttgctattaaatcttttattgatcctttattattaaaaaatttacttgaagatgaaaatgttgaaattaataatgataattttttcaattttatgctattagttcattctcttaataaatggattgataataaaaatgatattagagatagttctttaattaaagatgtatttgagaatgtaacatcaagaaaatatatttattctgatgattttgaagcttataatattaccgaagataggtttaacattgattacatctcaaagtacttatactctactctagttaaatcactaaaattagatacaatctgcacagatttatttaaatgtggtacagatattagttctaaacttgtgagtgaaaataaaattggtatagtgcatgctacatcagttacttcaataattatgagttttgtatctctgttaaacaatgtttatgaaaataataatattttaatttcttatggaatagatacatttaattttcttaataaattatcttataatgtttgtattattccagatagagataaatattttgaatatttaataactgttggtaaattaaaacaatctgataaagaattaatttctaaaactgtagataaatggattaaaattttaagtatttctaatatattacaatttgctaataaaaaaactttagattctgaatataaatacggtatgaactcacatattcctgtgtttgaattagataagttagaatcattaaatattaaaattgctgtaattaacaattatcttaatatttattatgataatttattagctgatcctattgatgaaattagaaattctactaataataatagtgtttttcttctaattaattcagacaatagtttcttaagcttatattctactaataataataggataagtaattattttaactcttatactgaatttacagatgataagagagttggtactattattaattcatattctttgatgggtattagtcacttgcaattcgatggttttagacttcccattaaaaatgcattatttagaaatcctaaattaaagaaagtgattaattctgcgtttaataatatattctctgactatgataatttattagttaaatcactaatagatgaattaggtttagatagtactattaattatatttcagtcttattagatgatttaattgctagtggcaaataccaattatgtcatctaaatgaattttctataatattattaagagagttagataataaagataagtttattgatgttagtacatataaatggaatttttcaaataaattacaaacacttgctggtgttaagtataatgttatatggttacctttgattaaattaattaaagataaaaatagtgataataaattcactatagaaattgatcaaagtaatgtgaatcaattactttctaaaattatggtaccattagaagttaataaatttataaataatgatattttatcattcataagtaataaagaaactaaattattgaatgaatacattaatatctataatatgaataataaagaagaattaattaatcaacctgaagtattaataaatgatgttaattcagctataattagtaagctagataatagtctaacagatttcattagtgataatattaaacatattattaattttttaattaggaattatagagatgaatttattaatttattacttaatgataaatctttaactacagttttaactactaaagcaaatgaattattaattaacaatcctaataaattaatctcatatgatgatatttttgctgaaagttataatcaagatgaacttaatagtcttaaagcatcaattaataaatgtttttctaaattaatgtttggacatgctaaagctatgacaggtttaatgcctatacctacttattttagagaacaatacatcaaagcagttttacaaagaattaaaggagaagaatccttaataaataaaaattataagattaaaagatattttacttataatagtaaaaatattactgatttcttaccattttcaggtaaggataagtgtatgatgacggtagatatagatgtaaatagttctactataattaatcttaaacaaaaattaaaatctttattaaagatatttttgattaattgtttaaaagagttgaatactaataatattattagtcctactacttatttaaactctaataatctatttgaatatacttttaatgaattcttaaatgaatatagtaattcattacctagtgctggtactgataatgatattaatttaataaattatacattatattgtttaggtcctaaaatgttattagataaatctatatcatcattagatcttgattatattaaatccattaataatgacagtttaccaaataatatgaaagatgatgaatatatatcaaaaatttctgatatacttaaatctaattataattcaaataagttcttatcattaagacctattactggacataaaaattggattactttaattgctgattattcagtagtaacaaaagcaatattatctgcttttaatataagtaaagatttacttgaattagtatttgattctgaatttgatactattatagaaaatactgttgctgaatttatagtacttcttagataggtgataatatgctattagaagagttatttaatgaatttcaagctagtataaatgaattttttcctcagttagtatatgataaaaatgaaatcagaacaaactttatgaaaagatttagtaaatataatggtacaagcaagaagataattgaattcttaccaaatattaaagatgatgatattagattacttaatgttattgataaatttaaatcaatattatcaaataaatactctgatgcaaatgttagttttgatggtataagctatattaaaccttacagaggtaaagacataaatagattaaatgttcttatgtcagcagaagtatcacagactatagctaatcctattttaggttgtgtcattagatatgatgataacttttatgatacagctgatagagttcttagtagtataaagaagtcagttcctaaagttaatattaatgatacaataagaaaaagaaaaaattctagtagtggttctttttttggaataagtactcatgatttttatatgagattatttaatatatttaaacataacgttctcagtcaaggttgggattacattaataaacaatgtgattcaagtagagaaatatttactcaacctttaactagaagaatggataaagcaccaaaagtatactatgatatgactactaaaggtgagatagaagaaatcacaagagagttagactcatcttataataatttgaagaaatataagttagttacttcaagacatagatttgttaataatgtatctgaaatagaaaggatgtttcacttattctataatttagtttcagattctataaagaacaactatgcttgttctttaacttatgatagagattatattaatagtatatgtgataaattttgtaatatagttgattattatgatttaaatgcatatattcctgttggaactgatggttctgcatttgataaacatgtacctgaaccattaatgcataaattagaatctttctactctagttattattatgataaaccttttttatcaaattttagatgtagaaaaagactaatatttcctaatgataaaggtgaagctattaattataatgatattattactaacttacaatcttatttattagcacataatattgatccaaaggttaatgaaaacattacaaaacttcttgataaatataaaacaatattaaatttagatagtggtaaatcatcagtttcatttgatggtaaattaagtagagtaatttcagaggttattatattagaaaaaatacttaataaagaattatctgaagatgaaattgactcatttttaaataataaattattaattagaccagatatgattaataagaatattattaaggattatacagattttataaatgagttgaataaagaaaatgaaagcaatatgtcagatatagaaagatttttattaaaatctagtattaaatttgaagactgtcaagaatttgtttttagatttaataattctagtgatgataatttagcttttatgaatagatggttcgctaatctatatctatatgttatattactaaataataaaaaacaacaaagtttaaaaacatttgatgatattactaatatagttgatttatcatttttaccagttgatttagatggtgaatatttatctatggtatttgtgagagaagaaaacaccaataatattagatttactcataattcaatgcgtagatttgctagtatgcttaaacctgagcatggagttaaattgaaggatggttataaagatttcaaattaggattaatgagtagaattgaaacatttcaagaatgtgtagatggtcttgaaaatttcgatattcttaataatttatttatagaagaatttaatgaaaacttagtaagtttagtaaacaaattgatagtacaagtacaattgagtcaatctgaacttccagaacatttaaaagcatcattgactgaagctgaaaaattattattaactaattctgattatatatattataagataaatcctaatgatattagacctgaattactagattatcttttctttaatatagataaaaatgatttattagaaatattaaataagcttaatgttgattttgagttattaactgatcaggaaatactagaattagttgaaaggaggaaagaacttgataaccattaatttaattaataattcattgactgataatgataaatttagtgaactatttgaattaattgaatctagtcatcatgtactaaataaaaaatataaatttttagttaaagatgatttaaaattaatattttctgctaatgggattagagtggtggttattcctaaaaattttatatttgatggtttatcattgaatatatttggaataaaacttaaaagagagttattttttccagcattaattcatgattattactattcgacaaaaatagtaagtagaaaagatgcagataaagttttatttagtatgatatgtaatgatcatgccaaaatacttgctggtataatttatgttggagttaggttatttggtggtaggtattatggtagtaagtgataaaatattaaatttacttttaataaataaatttgaatttaatagattaatacatgaattagaagagaaaaatattttctttaatcagatttattcacaatttcctataattgttaattttaatgatttagaaattataaaaaatagaattttagataaggaggttgacttaaatgaattcattaacattatctcaaaaattaatttacatattgagtcagaagatgttaataactgaagatcatattattaacatatcaaatatattagataatgatactttacttgattatgtaaaacttaattttgatgatgaagtttataatcaaatttatactttaatgaattcttagtcttatgatatgagattttatggtattaaattagaaaaattaatttttcctgtagatgaaactataatggaattaatgagaaaggttggtgaacttgagactcataataaatttctaaataattctaaaggttcgtctgcaaaaggaaagtatcaaattcttaatagtactttcaaaagaattattaagtattacagttcattaggttttatagaagatgagaaagttttcttaactcataatgaagataatgatgattccataatgctacttattatggattattatgtcagaacaattaaaagtgtttttgacttagctgatattacacctggtacaatatatttatgtcactttattggggctgaaagatcattacaattattaagacacagtaattatactattaaatctttattaagtaataatgaaattagttggaataaagatgtttttaagagattctctttagatatcaatacaacaacaggttaccaatttattgataaaattgattcgttagtgtaattctaaatttaaactttattctaggaggttaaatgaaatataatgagatagtaaatctattcaaacatagtgaatataaaactgctataacaaaaaatatgcctaaagatgtattagaaacagtattcaataggtctttagagcaaggaataaacccctttttaccaatttttcaaatagctgtagaaacttctggtaaaccaaaattacacgttaagaatgataactcatataattggtttaacattactgctacagaaaaacaaaaacatgtagtttatcctgttccagaatatgacagaaatggaagaaaaactattagaaatgttaaattcagagtgttcaattcattaaatgatgctgtagatgaatttattaaattaattaaaaattcatatcctaattataataaagtcaactataagtctttaataaataagaatggagctgcttatgcttcagcagattataatggccaatcttatactcagatggtaattgatgttgctaaaaataactttaaaactttaggtgtaaatgattattctattgaaaatttacaaaaattatttaaaggtaattttgttaatcttaataataataaatcagatgtacccagtaacagaagaaataggtcaataaaagctgagcaattcagtaaaagagaaacattatctaaagataatacttttaaaaatatttctttatcttctgctaaaaggaaacaagaaattagtaaaaatgttaaaaaaggatataataataaaacagtaactgcaaagaaaaataataataaaccttatgaaattgtaaataatgataagcattttacaatatcagttaatggtaagtcaatagatattattaattctgatgtacatgcaactgataaatggaataaatatattaaaaatgttgcggatgaatttataaaaactggtaaacttaatattaactataatggtatgacttttttcatagatagtgatattaaatttaacaaatttatagataagttaacattagattatatcgaatttaggaaatcaagataatttaatggttttattattattaaatgagctgaacattttaaacaggcggtcttaggatccgcgcggacgcgcagatcctaagacctgtctcttatacacatctgacgctgccgacgagagtagccggggggagctcggggggggggggggggtggaaaacaaaaaagatcagaggagaggaggggaggaggagagg

SEQ ID NO: 19 - DNA, 5093 bp, Artificial Sequence
  bacteriophage genomic nucleic acid sequence
gagatgtgtataagagacagaaattatagacataatttaatttattataacatatctgtccaagcagactcagtttagacagatatgttataataaattaaattatgtctataatttagtatattatatagtacttaataaaaaaacttgtctaagtttaataaaatagtacaatcaatgatatgtctatatcatgatgctttccaagaagtaaataaaattaaggaggtgcattatgaaaacttaaaataaagttatttttattttatattttaattaagttagtttgtttagttttatttatttatttaattcgattggaggtaaaataatgaaatttttattaggaaacactgaattaactgatggtaattatgcggatttattacataaattacaagatcaattaagttttaaagttgaattttctaaaactattaaagcaatcattattaaagataatgaagattgctttatagatgtaaatgtttattctgttattaatagctataaaactaataaaattaatgatttagcgtcatttattcttagttattatatagattaacaatattaaactatattattaatcattgtttatttaagaagaataacattaaaaacaactataataaaaatagttcttttaaagaaatattggttatagtgaatttaaattaattgagcaaaaagattttatagaaattaaatttaaacttcataataataagtttgaatttataattaatattgttatatataggaggacatatgaagattagtattatacaagtaccaagttgttatgatttaagaaattgcaaaaattacttaacttgccttggacttaaaaaccttaaagttttattaagtgatgatattgaaggcattgatcttaattcaacgattgaagatattttattaaaattaaattacgatattaataaatctgttaatttaatcatactaacaaattatcatttattaatgaacagttataacattttaaagaaattcaataggaaaatttctttagttgatttactcattaatgataacatacatatatgttaccagataggtataccaggacatgattcaaaatatcttaaacttattttaaataaattaagtaatgaaggtaaaatcgatgagtttattaaagaatataatacttatattaatttatatagcaatcattcattctatgtgaatgaaatagatacagagttatgtaattcaaaatttttaataaattttattattggaggtatttatgctaagtaataagttttatgatgaattagcggcattaattgttgctagtaagatagataaagataatgatagctggttagaagctggtttaaaagctatctcaccacctattattgaagatcaaatgggtgaagagattgataatgcttatgctttatacaatgaacttggtatatcatttagtttgaataacccaattaagttaagagataaagttattaatttattagcattaaatcatattgaaaatggttatgagcttactttagctaaatatcaacttcaaaaaagaggagtaacacatgaaatatttaataatatgcctctagatgaagatactctttttaatatgctttacaaaatgattaataattacaatatacctaaaatattatatgattcaattatgaataaaagtagaaataccatatcaaaaattaaaagagttaatagattaggagttgctgttaatgaattaggaataagaactaatccattcaaaacaggtgtcgttaaagacgttgatatatacagcgcagtagaaaatttgtctaatgatgagaatttaagccatttaacaggtaactttttaattgataatgatttattgtttggttgttatgctaatattggtactgctaattcaggtaaacaattgattaatgatatttttttatcatctcatactgaatctaattgttataaattacatattagttgtggtgaaagagcagatgtattattaaaagaacagtttaagtacggtttaatcagaaatgatgggattaaggataaatttgaagaatcaaaaattctacctgatcttatagatctaattagatttatacttgatcaaaaagctttaattactagtaatgataaagacaatgctaacatgattatcgttataaatagcattactagtatattgggtaatttatctaacaaaggttcatctagagcaggtattaataggcaaggattagataaattatatgctctactacagtttttaggtgaacatataaatgcagtgatcgtagctactcatagagttgataggaatgaaattgatgctggaattattaacatgattttaggtaatacttggggattaatagtaaataagatgttattacaggatagaagtctattagatacttctgatgaatctttagttagaacttctgcatttagatttattaataagcaagctaaacctaataaattaagatataaagatattgattataaatctatcataaaccatattgatgatttagtacacattaaggaggaattatgaaatttttaataccaaaaaaaacaaatactaaagatttgattatattattatctaatttcttagattttaatgtaacgactgaagaattagaagattataaaataatacttattaatgatgatttatcttatgaagttgatattagattatatatatctaattcagctactaaagctgagatctttaaagtttgtaaagatataatactatattattatatataatatgggggattagtcatatgataatcagaaagaagagtgatttaatatatcttatgcattatggtactaccgatgatagtaataatgttataattaatatagagaaattaactaataaaaatattaatttcattttaataggcattataaatataattattatatcaaatggtaatttacatgatatttttatatatgattttagtaaaaacaacactggtactaatcgtgaagtttatttaagaagtaaacatatagcttatccacaagaagtcagagctctaattcaatttattaatagccttgttaataaagagttttcatttgattacttttcaaacaagttgattgaaattattaaaactaattgtagtgagtcaattgtaccagattacatatgggatattaaaaacgactttaattttgttagagttggaactatacctgataattataaattaattatagatattagaaatttaattcataaagatggagaatttatttttgaaggtataggaggagattcatcatatttaccaataaataagtttttcggtttagtaaatcattttagttatcttcaagaagctgtgcctaaatttttatttaattataatggacatacatataatttaaagaaaaatatattacatttatattatagaccagatttatacgatatgattgacaaattaatgacacataatgataaaaataatataatttctagagatgagttatttaattcagcaataccacttcaatttgataatatttataataataatattgtaagaacgtttggtgataaagttattgttaatggtggttctatctataatggaaaagaagtagatttgactaattatttagataatatgattaattactttattaaaatgagtgaatttgattcacatagtaataaatcttattacccttttatcagagattctagaaatttaaactttattaattttgatatggatgaatctaactttagtcattttctcgttacatataattctatagcttataaatattgtgattactttgctgatgctattaattcgattgaaaattattttaatggtaaatttaaagaattaatcaaactaattgagataataactatagataatatgatagataattatttgtcttgggatttaactatattagatgatgaatcttctaagttaatagatttagtaagtgatataatgactattaatgaaaaatttgttgatagctatgatagtaaaaataattttactaaaatagatacaacattgatgtatcttaatgttttatatggctttaataaatttcgattaaacaatggaagcgttaaagaatataaatttgattttattacatcattgttaactaaagtaggaagcaatgtagaattagatttttatttattatcagaaatgcctgatattaatgttactattaaaggccattatatgatatggatattaaataatataataaataaaaattatttggaggtttaatgaaagaaaaatataagttaataattcctttagttaaaacattaatgaattttaaaaaggatgaagatagtgatagagttaaaaatttattagctgaaatagaaaataagaataaaattataaaagatttaaatatgaataataaccaattaaaaaaattatgtaaagataataaactaataggtgtagctagtggttctgctctaggattaattgggggtatgataattaatggcaataatagatgatgtcaaaacattaaaagataatatagctatgcttaaacgtattcatcaggatagtactactcataaatataatataactttaataggtagatattatactgatatcaatacagtactaaaagattatgcaactacaaaggaacaaattgcattattattagctgaatctggttctgatcaagataaattaagtgaattagtcgcaataaataataaattaaatagagagttattaatagctaataaatcaaataaagaatatgaagacttactagatgaattgataactattttgaagttgtaaaattataattaataatcagtaatgagctgtacatttaaaacaggcggtcttaggatctgtgcgttcgcgcggattttccgcccctagatcattcagtgctctacccccataattgaacactcaaggctgcacctagatgcatttcggagagaacgagctatctcctggttcgattggcttttcacccctaaacctacctcatccccc

SEQ ID NO: 20 - DNA, 3872 bp, Artificial Sequence
  bacteriophage genomic nucleic acid sequence
  misc_feature (2535)..(2538): n is a, c, g, t or u
  misc_feature (2546)..(2546): n is a, c, g, t or u
  misc_feature (2548)..(2548): n is a, c, g, t or u
agatcctaagaccgcctgttttaaatgtacagctcattcaactattagcgyttatagttttggttaatgaatgtaacgaaactaaagtaaatactaataattaatattacatctttaatatcattcatctctataacctcctaaggataatccaataagatcataagttcctaacgcctcttggatagtcttattgaaaggtatttcagttaccttttttccttcttgctcctgtactagatctatataacatttagttattgcaaagtaataaatyaaatcattattcatcaargctttrcaagctttattcaataaatcaaaatttaaagaaatttcttcaaagattttctcattattraatttaytcattaratctgaatatgcggaagcatcattagttatatcattatataattttggatctttacttcctacgagtttaggtctgaaagcaacagcgtttgcagttatttgcattttatcattttcttgatagataagaaaagataaagtaataggacttatacattcatagaataataccccactactataaccttgtactkyttgctcttcagtctcaccagagattctgaaaagttgagctctagtaacgttcggtagtactggactgaaagatgccgatcctgccggtatcggctttcctcgtaatccctcgtatgcctttctatctagttgaagtaaatcaattaatttrttaatagcatratgtgaagcttctttmacattattatgttgtttrgataartaagcaattaatttrgaatgyttayttactactccttcatcagtatttcttgtatcttctataacatctattctattatcatttttaattaaatcaatgtatctcttagtaaaatttagtaaaccttgatcttcactaattaacttattaatataaggtgttaaatcaatgttactaggatcagcattgattatctctgttaaattatatttaactaaatcttcatataacatcataaaagtattcaaaggaatactatatttaattagtttaataacaatgatagccatatcataatacaatttaacattagaatgaaaaccattyattttgaaawraaaatttaaaatcattcartttaattgttgtatggccaacattaatcataatattagcatcatttaragtrttatcagtaactatatcatatactaatacyttattatttgtatttaagatagtagtccaattaggtgaccaaggtaartcgactaaacctaaagttaataattgtatyttattagtatttggaactgaacaaggaataactatatcaatcatatcatataacctccyaatggtgaataytgatgaaagaattgrttyttctttwcattaacttcatcaatraattgattaatgaatggttttgttayygttatagtagtattcattccagatataatyttattaatgcctttatgagtraaagctaacacatgaggagaatcatccccaagygcgaacgtattagtytcttcattctcataagacaaagatgctctcacarctgaattatgatttataagtgatataaataacttaagaaaaataacatttgatattttatttaaaatatcattagtaattttttgttcagctaaatcattagcaaataatttcatctaatcacctcttcttgttagtaagatgaaacctaagccaacccctaaaagtaaaagtaactttttgttttttaacaaacccattaatatacttccacctgctatgctaccagctatgccagggttatcacctataaattttgttcctttttctataatagtagtgagcgaaccaattaattttgatattataccagatgcaggagcaacagcagcagcacctactaaaccactagtagcaccatgtccagccttcgcagcagctagtcctaaggctcccgttgatgtagcagcaaatgtggttttgctagcagcagtaagtgcgaaatactgccacgcaaaatacgctaacacacatataagaactattactaatataagcttccagtgctttttaataaagctcttaattgctttaaatgctttgctgattccactaccaattttcttccaaaaactcattctattcctttattagtttttggaaattaacagttttaaatttcttaatagctactaatattccataaacagcttctatagartaaccaactggatctttcatraaaccaagaattgctgctgctgcwccagctacagttggtattaaattttcaatattaaaattatcakttttttcatcacctaaraaattaaayacaccatcagcrgtagctaaagtagcaacagctattggtacatctaattgtttwccaactaatttaayaatrttatctgaattrccatctttcttttctaraaaagctctaaaygtcattccagctaatacyactaaacctggtaaaaaaaattttttaaaytcaatytttgtatctgccataattcctcctaaataannnnaattttanantaattataatcagyytaaatttrattttaaactgawatgrttwaattttgyatttaaatagataattcatataattaaaagatagaaagtcagtgttagtaactcatatcaacattaccaagcctgtgcatcactgtttgactcatcgtctccagaatttagtcgaactgtatgataatggtctttagaattattaactaaacgtactgattcaggacttttgctgctagcaactgtttgttcaataaaaccaaatatacctttaacttgagctctttgactaggatgtaccatctgtgttaagtaagatttgacctcattagctgacttgaactcaggtatatctgattctggaatgttcaataaaacagcagtaatgcatcttaacttcgcaacatcacctgtatccgccctaccgattgccataactttttcaaatttttctctatctgcatcatccatgtctatacccataagacctgctaaattaaaaatattatttaaatccattcaaacctccattaagcatttttataacaatttaatgctactatatcatctacagttaaccatgttcttggtaataagtaagatgtagtaacaacagatattacatcatccatccagccttgttcatcatatgtaacccattctaatggttctctaactggtgtactagctaaatcaattaataaatctgtttcatcaaaaagacgcatttttttaaatgcttcatcaattatactagtaattaaattaaagtcttttggttctaaggctttatttactcctactacagtataaatattatcaataaatggaactgaaatagctctaattttaataagaggtgtattttcaccatatttatcctgtaattctcttccaagctgaccataaactaaaggtactccaacttttcttaacatatttctagttaattctttttcagagtaaccagaatttttaaatttaaaagccttaaaataacctctacctaagttataagcagcttgagcagctaagacagaagctactgctactccaaattttttagctaaatctttaacattctcagacattttatcaaatagagaactatcaactttttttgcttgagcaattaagttttggtcaggaactacttgttcaagaaatggtttgatagacatatctccactttcagtaaaaacacctttaattagtttaggatctaactgattcttatctaattgtgccatatttcctcctttgcacaggtaactaaaatttgccgaattgccgtagatttaaagtgtcaccactccctttttcgaaagggtaa

1. A method of treating a disease associated with a Fusobacterium nucleatum infection in a subject in need thereof, comprising administering to the subject a therapeutically effective amount of at least one isolated bacteriophage capable of infecting a Fusobacterium nucleatum bacterial species causing the infection,
wherein said at least one bacteriophage has a genomic nucleic acid sequence at least 85% identical to:
(i) the nucleic acid sequence as set forth in SEQ ID NOs: 1, 2, 3, 4, 5, 6, 7, 15, 16, 17, 18, 19 or 20, or
(ii) the genomic nucleic acid sequence of a bacteriophage deposited with the DSMZ under deposit number DSM 33306, DSM 33307, DSM 33582, DSM 33583, DSM 33639, DSM 33640, DSM 33641, DSM 33642 or DSM 33644,
thereby treating the disease associated with the Fusobacterium nucleatum infection.

2. (canceled)

3. The method of claim 1, wherein said disease is cancer.

4. (canceled)

5. The method of claim 3, wherein said cancer is selected from the group consisting of oral and esophageal cancer, colorectal cancer, pancreatic cancer, gastric cancer, gall bladder cancer, breast cancer, lung cancer, bladder cancer and melanoma.

6. The method of claim 3, wherein said administering comprises intratumoral administration.

7. The method of claim 1, further comprising identifying at least one strain of Fusobacterium nucleatum colonizing the subject prior to the administering.

8. (canceled)

9. The method of claim 1, wherein said at least one bacteriophage has a genomic nucleic acid sequence at least 85% identical to the nucleic acid sequence as set forth in SEQ ID NOs: 3, 4 or 5.

10. The method of claim 1, comprising administering to the subject at least two bacteriophages, wherein each of said at least two bacteriophages is capable of infecting a non-identical Fusobacterium nucleatum bacterial sub-species.

11. The method of claim 1, comprising administering to the subject two or more different bacteriophages, wherein said two or more different bacteriophages are capable of infecting different Fusobacterium nucleatum bacterial strains.

12. The method of claim 1, comprising administering to the subject at least two bacteriophages, wherein each of said at least two bacteriophages is capable of infecting an identical Fusobacterium nucleatum bacterial sub-species.

13. The method of claim 1, comprising administering to the subject two or more different bacteriophages, wherein at least two of the two or more bacteriophages are capable of infecting an identical Fusobacterium nucleatum bacterial sub-species.

14. The method of claim 1, wherein said at least one bacteriophage is genetically modified such that the genome thereof comprises a heterologous sequence.

15. The method of claim 14, wherein said heterologous sequence encodes a therapeutic agent or a diagnostic agent.

16. The method of claim 14, wherein said bacteriophage has a genomic nucleic acid sequence at least 85% identical to the nucleic acid sequence as set forth in SEQ ID NOs: 1, 2, 6 or 7, or a genomic nucleic acid sequence at least 85% identical to the genomic nucleic acid sequence of a bacteriophage deposited with the DSMZ under deposit number DSM 33306, DSM 33307, DSM 33639 or DSM 33644, and wherein said heterologous sequence renders said bacteriophage lytic.

17-23. (canceled)

24. A composition comprising two or more different isolated bacteriophages capable of infecting a Fusobacterium nucleatum bacterial strain, wherein at least one of said two or more different bacteriophages has a genomic nucleic acid sequence at least 85% identical to the nucleic acid sequence as set forth in SEQ ID NOs: 1, 2, 3, 4, 5, 6, 7, 15, 16, 17, 18, 19 or 20, or has a genomic nucleic acid sequence at least 85% identical to the genomic nucleic acid sequence of a bacteriophage deposited with the DSMZ under deposit number DSM 33306, DSM 33582, DSM 33307, DSM 33583, DSM 33639, DSM 33640, DSM 33641, DSM 33642 or DSM 33644.

25. (canceled)

26. The composition of claim 24, wherein each of said two or more bacteriophages is capable of infecting a non-identical Fusobacterium nucleatum bacterial sub-species.

27. The composition of claim 24, wherein each of said at least two bacteriophages is capable of infecting an identical Fusobacterium nucleatum bacterial sub-species.

28. The composition of claim 24, wherein at least two of said two or more bacteriophages is capable of infecting a non-identical Fusobacterium nucleatum bacterial sub-species.

29. The composition of claim 24, wherein at least two of said two or more bacteriophages are capable of infecting an identical Fusobacterium nucleatum bacterial sub-species.

30. The composition of claim 24, wherein said at least one bacteriophage is genetically modified such that the genome thereof comprises a heterologous sequence.

31-37. (canceled)

38. An isolated bacteriophage capable of infecting a Fusobacterium nucleatum bacterial species, wherein said bacteriophage has a genomic nucleic acid sequence at least 85% identical to the nucleic acid sequence as set forth in SEQ ID NOs: 1, 2, 3, 4, 5, 6, 7 15, 16, 17, 18, 19 or 20, or having a genomic nucleic acid sequence at least 85% identical to the genomic nucleic acid sequence of a bacteriophage deposited with the DSMZ under deposit number DSM 33307, DSM 33306, DSM 33582, DSM 33583, DSM 33639, DSM 33640, DSM 33641, DSM 33642 or DSM 33644.
